(19) United States
(12) Patent Application Publication
(10) Pub. No.: US 2026/0185058 A1
(43) Pub. Date: Jul. 2, 2026

(54) METHODS AND COMPOSITIONS FOR TRANSDUCING HEMATOPOIETIC CELLS

(71) Applicants: President and Fellows of Harvard College, Cambridge, MA (US); Massachusetts Institute of Technology, Cambridge, MA (US); The Broad Institute, Inc., Cambridge, MA (US)

(72) Inventors: Amy J. Wagers, Cambridge, MA (US); Mohammadsharif Tabebordbar, Cambridge, MA (US); Ozge Vargel Bolukbasi, Cambridge, MA (US); Vivian Garcia, Cambridge, MA (US); Simon Ye, Cambridge, MA (US); Naftali Horwitz, Cambridge, MA (US)

(21) Appl. No.: 19/102,329

(22) PCT Filed: Aug. 10, 2023
(86) PCT No.: PCT/US2023/030022

§ 371 Date: Feb. 7, 2025

Related U.S. Application Data
(60) Provisional application No. 63/396,922, filed on Aug. 10, 2022.

(51) Int. Cl. C12N 7/00; A61K 48/00; C12N 15/86

(52) U.S. Cl. CPC C12N 7/00; A61K 48/0016; C12N 15/86; C12N 2750/14122; C12N 2750/14143; C12N 2750/14145; C12N 2810/40

(57) ABSTRACT

Described herein are hematopoietic cell-specific targeting moieties and compositions including the hematopoietic cell specific targeting motifs. Also described herein are uses of the hematopoietic cell-specific targeting motifs and compositions including the hematopoietic cell specific targeting moieties. In some embodiments, the hematopoietic cell-specific targeting moieties and compositions including the hematopoietic cell specific targeting moieties can be used to direct delivery of a cargo to a hematopoietic cell.

### RELATED APPLICATION(S)

[0001] This application claims the benefit of and priority to U.S. Provisional Application No. 63/396,922, filed Aug. 10, 2022. The entire teachings of the above application are incorporated herein by reference.

### GOVERNMENT SUPPORT

[0002] This invention was made with government support under AG063419 awarded by National Institutes of Health (NIH). The government has certain rights in this invention.

### BACKGROUND OF THE INVENTION

[0003] Recombinant AAVs (rAAVs) are the most commonly used delivery vehicles for gene therapy and gene editing. Nonetheless, rAAVs that contain natural capsid variants have limited cell tropism. Indeed, rAAVs used today mainly infect the liver after systemic delivery. Further, the transduction efficiency of conventional rAAVs in other cell-types, tissues, and organs by these conventional rAAVs with natural capsid variants is limited. Therefore, AAV-mediated polynucleotide delivery for diseases that affect cells, tissues, and organs other than the liver (e.g., nervous system, skeletal muscle, and cardiac muscle) typically requires an injection of a large dose of virus (typically about 1×10¹⁴ vg/kg), which often results in liver toxicity. Furthermore, because large doses are required when using conventional rAAVs, manufacturing sufficient amounts of a therapeutic rAAV needed to dose adult patients is extremely challenging. Additionally, due to differences in gene expression and physiology, mouse and primate models respond differently to viral capsids. Transduction efficiency of different virus particles varies between different species, and as a result, preclinical studies in mice often do not accurately reflect results in primates, including humans. As such there exists a need for improved rAAVs for use in the treatment of various genetic diseases.

### SUMMARY OF THE INVENTION

[0004] Embodiments disclosed herein provide hematopoietic cell-specific targeting moieties that can be coupled to or otherwise associated with a cargo. The hematopoietic cell-specific targeting moieties can contain one or more of an n-mer motif, which may be an enhanced hematoAAV motif and can confer hematopoietic cell-specificity of the targeting moiety.

[0005] Described herein are compositions comprising a targeting moiety effective to target a hematopoietic cell, wherein the targeting moiety comprises one or more n-mer motifs, wherein at least one n-mer motif comprises or consists of a) any one of SEQ ID NOs: 1-1000; b) any one of SEQ ID NOs: 2001-3000; c) any one of SEQ ID NOs: 4001-5000; d) any one of SEQ ID NOs: 6001-7000; e) any one of SEQ ID NOs: 8001-9000; f) any one of SEQ ID NOs: 10001-11000; or g) or any combination thereof.

[0006] In some embodiments, the hematopoietic cell is a differentiated hematopoietic cell or a progenitor cell.

[0007] In some embodiments, the targeting moiety comprises a polypeptide (e.g., a viral polypeptide or viral capsid polypeptide), a polynucleotide, a lipid, a polymer, a sugar, or any combination thereof. In one embodiment, the targeting moiety comprises an adeno associated virus (AAV) polypeptide or adeno associated virus (AAV) capsid polypeptide.

[0008] In some embodiments, the n-mer motif is inserted between any two amino acids of the viral polypeptide, viral capsid polypeptide, AAV polypeptide, or AAV capsid polypeptide. In some aspects, the n-mer motif is inserted into the viral polypeptide, viral capsid polypeptide, AAV polypeptide, or AAV capsid polypeptide such that 1, 2, or more N-terminal and/or C-terminal amino acids of the n-mer motif replaces 1, 2, or more amino acids of the viral polypeptide, viral capsid polypeptide, AAV polypeptide, or AAV capsid polypeptide. In some embodiments, the n-mer motif is inserted between any two contiguous amino acids between amino acids 262-269, 327-332, 382-386, 452-460, 488-505, 527-539, 545-558, 581-593, 598-599, 704-714, or any combination thereof in an AAV9 capsid polypeptide or in an analogous position in an AAV1, AAV2, AAV3, AAV4, AAV5, AAV6, AAV7, AAV8, AAV rh.74, AAV rh.10 capsid polypeptide.

[0009] In some embodiments, the AAV capsid polypeptide is an engineered AAV capsid polypeptide having reduced or eliminated uptake in a non-hematopoietic cell (e.g., a liver cell) as compared to a corresponding wild-type AAV capsid polypeptide (e.g., an AAV1, AAV2, AAV3, AAV4, AAV5, AAV6, AAV7, AAV8, AAV9, AAV rh.74, or AAV rh.10 capsid polypeptide). In some embodiments, the engineered AAV capsid polypeptide comprises one or more mutations that result in reduced or eliminated uptake in a non-hematopoietic cell. The the one or more mutations may include a) in position 267, b) in position 269, c) in position 504, d) in position 505, e) in position 590, or f) any combination thereof in the AAV9 capsid protein (SEQ ID NO: 12001) or in one or more positions corresponding thereto in a non-AAV9 capsid polypeptide (e.g., AAV1, AAV2, AAV3, AAV4, AAV5, AAV6, AAV7, AAV8, AAV rh.74, or AAV rh.10 capsid polypeptide). In one aspect, the mutation in position 267 in the AAV9 capsid protein (SEQ ID NO: 12001) or position corresponding thereto in a non-AAV9 capsid polypeptide is a G or X mutation to A, wherein X is any amino acid. In one aspect, the mutation in position 269 in the AAV9 capsid protein (SEQ ID NO: 12001) or position corresponding thereto in a non-AAV9 capsid polypeptide is an S or X to T mutation, wherein X is any amino acid. In one aspect, the mutation in position 504 in the AAV9 capsid protein (SEQ ID NO: 12001) or position corresponding thereto in a non-AAV9 capsid polypeptide is a G or X to A mutation, wherein X is any amino acid. In one aspect, the mutation in position 505 in the AAV9 capsid protein (SEQ ID NO: 12001) or position corresponding thereto in a non-AAV9 capsid polypeptide is a P or X to A mutation, wherein X is any amino acid. In one aspect, the mutation in position 590 in the AAV9 capsid protein (SEQ ID NO: 12001) or position corresponding thereto in a non-AAV9 capsid polypeptide is a Q or X to A mutation, wherein X is any amino acid. In one aspect, the engineered AAV capsid protein is an engineered AAV9 capsid polypeptide comprising a mutation at position 267, position 269 or both of a wild-type AAV9 capsid protein (SEQ ID NO: 12001), wherein the mutation at position 267 is a G to A mutation and wherein the mutation at position 269 is an S to T mutation. In one aspect, the engineered AAV capsid protein is an engineered AAV9 capsid polypeptide comprising a mutation at position 590 of a wildtype AAV9 capsid protein (SEQ ID NO: 12001), wherein the mutation at position 509 is a Q to A mutation. In one aspect, the engineered AAV capsid protein is an engineered AAV9 capsid polypeptide comprising a mutation at position 504, position 505, or both of a wild-type AAV9 capsid protein (SEQ ID NO: 12001), wherein the mutation at position 504 is a G to A mutation and wherein the mutation at position 505 is a P to A mutation.

[0010] In some embodiments, the composition is an engineered viral particle, optionally an engineered AAV particle (e.g., an engineered AAV1, AAV2, AAV3, AAV4, AAV5, AAV6, AAV7, AAV8, AAV9, AAV rh.74, or AAV rh.10 viral particle).

[0011] Also described herein are compositions comprising a targeting moiety effective to target a hematopoietic cell, wherein the targeting moiety comprises one or more n-mer motifs, wherein at least one n-mer motif comprises or consists of VKXₙ, wherein Xₙ is each selected from any amino acid, wherein n is 5. Further described herein, are compositions comprising a targeting moiety effective to target a hematopoietic cell, wherein the targeting moiety comprises one or more n-mer motifs, wherein at least one n-mer motif comprises or consists of VKXₙYGAL, wherein Xₙ is each selected from any amino acid, wherein n is 1.

[0012] The compositions described herein may further include a cargo, wherein the cargo is coupled to or is otherwise associated with the targeting moiety. In some embodiments, the cargo: a) is effective to treat or prevent a blood disease or disorder; b) is effective to treat or prevent a non-blood disease or disorder; c) is a vaccine; or d) any combination thereof.

[0013] Also described herein are vector systems comprising a vector comprising one or more polynucleotides, wherein at least one of the one or more polynucleotides encodes all or part of a targeting moiety effective to target a hematopoietic cell, wherein the targeting moiety comprises one or more n-mer motifs, wherein at least one nmer motif comprises or consists of a) any one of SEQ ID NOs: 1-1000; b) any one of SEQ ID NOs: 2001-3000; c) any one of SEQ ID NOs: 4001-5000; d) any one of SEQ ID NOs: 6001-7000; e) any one of SEQ ID NOs: 8001-9000; f) any one of SEQ ID NOs: 10001-11000; or g) or any combination thereof. Optionally the vector system includes a regulatory element operatively coupled to one or more of the one or more polynucleotides.

[0014] In some embodiments, the vector system further includes a cargo polynucleotide, wherein the cargo polynucleotide is optionally operatively coupled to the at least one polynucleotide that encodes all or part of the targeting moiety. In some embodiments, the vector system is capable of producing a polypeptide (e.g., a viral polypeptide, e.g., a viral capsid polypeptide) comprising or consisting of the targeting moiety. In some embodiments, the vector system is capable of producing an adeno associated virus (AAV) polypeptide, optionally an AAV capsid polypeptide. In some embodiments, the vector system is capable of producing a viral particle, optionally an AAV particle, wherein the viral particle optionally contains a cargo. In one embodiment, the AAV polypeptide, AAV capsid polypeptide, and/or AAV particle are engineered AAV1, AAV2, AAV3, AAV4, AAV5, AAV6, AAV7, AAV8, AAV9, AAV rh.74, or AAV rh.10 viral particles or polypeptides.

[0015] In some embodiments, the polypeptide comprises one or more n-mer motifs inserted between two amino acids of the polypeptide, optionally such that the one or more n-mer motifs is external to a virus capsid produced by the vector system. In one embodiment, an AAV capsid polypeptide comprises one or more n-mer motifs inserted between any two contiguous amino acids (e.g., 262-269, 327-332, 382-386, 452-460, 488-505, 527-539, 545-558, 581-593, 598-599, 704-714, or any combination thereof) of an AAV9 AAV1, AAV2, AAV3, AAV4, AAV5, AAV6, AAV7, AAV8, AAV rh.74, or AAV rh.10 capsid polypeptide. In some embodiments, the AAV capsid polypeptide is an engineered AAV capsid polypeptide having reduced or eliminated uptake in a non-hematopoietic cell (e.g., a liver cell) as compared to a corresponding wild-type AAV capsid polypeptide (e.g., an AAV1, AAV2, AAV3, AAV4, AAV5, AAV6, AAV7, AAV8, AAV9, AAV rh.74, or AAV rh.10 capsid polypeptide).

[0016] In some embodiments, the engineered AAV capsid polypeptide comprises one or more mutations that result in reduced or eliminated uptake in a non-hematopoietic cell, optionally wherein the one or more mutations are a) in position 267, b) in position 269, c) in position 504, d) in position 505, e) in position 590, or f) any combination thereof in the AAV9 capsid protein (SEQ ID NO: 12001) or in one or more positions corresponding thereto in a non-AAV9 capsid polypeptide (e.g., AAV1, AAV2, AAV3, AAV4, AAV5, AAV6, AAV7, AAV8, AAV rh.74, or AAV rh.10 capsid polypeptide). In one embodiment, the mutation in position 267 in the AAV9 capsid protein (SEQ ID NO: 12001) or position corresponding thereto in a non-AAV9 capsid polypeptide is a G or X mutation to A, wherein X is any amino acid; b) the mutation in position 269 in the AAV9 capsid protein (SEQ ID NO: 12001 or position corresponding thereto in a non-AAV9 capsid polypeptide is an S or X to T mutation, wherein X is any amino acid; c) the mutation in position 504 in the AAV9 capsid protein (SEQ ID NO: 12001 or position corresponding thereto in a non-AAV9 capsid polypeptide is a G or X to A mutation, wherein X is any amino acid; d) wherein the mutation in position 505 in the AAV9 capsid protein (SEQ ID NO: 12001) or position corresponding thereto in a non-AAV9 capsid polypeptide is a P or X to A mutation, wherein X is any amino acid; e) wherein the mutation in position 590 in the AAV9 capsid protein (SEQ ID NO: 12001) or position corresponding thereto in a non-AAV9 capsid polypeptide is a Q or X to A mutation, wherein X is any amino acid; f) the engineered AAV capsid protein is an engineered AAV9 capsid polypeptide comprising a mutation at position 267, position 269 or both of a wild-type AAV9 capsid protein (SEQ ID NO: 12001), wherein the mutation at position 267 is a G to A mutation and wherein the mutation at position 269 is an S to T mutation; g) the engineered AAV capsid protein is an engineered AAV9 capsid polypeptide comprising a mutation at position 590 of a wild-type AAV9 capsid protein (SEQ ID NO: 12001), wherein the mutation at position 509 is a Q to A mutation; h) the engineered AAV capsid protein is an engineered AAV9 capsid polypeptide comprising a mutation at position 504, position 505, or both of a wild-type AAV9 capsid protein (SEQ ID NO: 12001), wherein the mutation at position 504 is a G to A mutation and wherein the mutation at position 505 is a P to A mutation; or i) any permissible combination thereof.

[0017] In some embodiments, the vector system further includes a polynucleotide that encodes a viral rep protein, optionally an AAV rep protein. In one embodiment, the polynucleotide that encodes the viral rep protein is on the same vector or a different vector as the one or more polynucleotides and is optionally operatively coupled to a regulatory element.

[0018] In some embodiments, the vector system is capable of producing a composition or a portion thereof as described herein.

[0019] Also described herein are polynucleotides that encode all or part of a composition described herein. Also described herein are polypeptides encoded by a vector system described herein or encoded by a polynucleotide described herein, or both. In some embodiments, the polypeptide is coupled to or otherwise associated with a cargo.

[0020] Further described herein is a particle, optionally a viral particle, produced by a vector system and/or a polynucleotide described herein, wherein the particle optionally comprises a polypeptide described herein.

[0021] In some embodiments, the particle is an AAV particle, and optionally comprises a cargo. In some embodiments, the cargo or cargo polynucleotide a) is effective to treat or prevent a blood disease or disorder; b) is effective to treat or prevent a non-blood disease or disorder; c) is a vaccine; or d) is any combination thereof.

[0022] Also disclosed herein are cells comprising a composition, a vector system, a polypeptide, or a particle as described herein, or any combination thereof. In some embodiments, the cell is a hematopoietic cell (e.g., a prokaryotic cell or eukaryotic cell).

[0023] Disclosed herein are pharmaceutical formulations comprising a composition, a vector system, a polypeptide, a particle, or a cell described herein, or any combination thereof; and a pharmaceutically acceptable carrier.

[0024] Also disclosed herein are methods of treating or preventing a disease, optionally a blood disease, or a symptom thereof in a subject in need thereof, comprising administering to the subject in need thereof a composition, a vector system, a polypeptide, a particle, a cell, or a pharmaceutical formulation as described herein, or any combination thereof.

[0025] In some embodiments, the blood disease or disorder is selected from the group consisting of HIV/AIDs, blood cancers (e.g., leukemia, lymphoma, myeloma, monoclonal gammopathy of undetermined significance (MGUS)), bleeding disorders (e.g., acquired platelet function defects, congenital platelet function defects, disseminated intravascular coagulation (DIC), prothrombin deficiency, factor V deficiency, factor VII deficiency, factor X deficiency, factor XI deficiency (hemophilia C), Glanzmann disease, hemophilia A, hemophilia B, idiopathic thrombocytopenic purpura (ITP), von Willebrand disease (types I, II, and/or III)), hemoglobinopathies (e.g., sickle cell disease (HbS), sickle cell trait (HbAS), sickle cell-hemoglobin C (HbSC), sickle cell-thalassemia (HbS and HbA), thalassemia (alpha thalassemia and beta thalassemia), hemoglobin C disease (HbCC), hemoglobin C trait (HbAC)), primary immunodeficiencies (e.g., autoimmune lymphoproliferative syndrome (ALPS), APS-1 (APECED), BENTA disease, caspase eight deficiency state (CEDS), CARD9 deficiency and other sydromes of susceptibility to candidiasis, chronic granulomatous disease (CGD), common variable immunodeficiency (CVID), congenital neutropenia syndromes, CTLA4 deficiency, DOCK8 deficiency, GATA2 deficiency, glycosylation disorders with immunodeficiency, hyper-immunoglobulin E syndromes (HIES), hyper-immunoglobulin M syndromes, interferon gamma deficiency, interleukin 12 deficiency, and interleukin 23 deficiency, leukocyte adhesion deficiency (LAD), LRBA deficiency, PI3 kinase disease, PLCG2-associated antibody deficiency and immune dysregulation (PLAID), severe combined immunodeficiency (SCID), STAT3 dominant-negative disease, STAT3 gain-of-function disease, wards, hypogammaglobulinemia, infections, myelokathexis (WHIM) syndrome, Wiskott-Aldrich syndrome (WAS), x-linked agammaglobulinemia (XLA), x-linked lymphoproliferative disease (XLP), XMEN disease), cytopenias (anemia, leukopenia, thrombocytopenia, pancytopenia, autoimmune cytopenia, refractory cytopenia), and storage and metabolic disorders (e.g., diabetes, familial hypercholesterolemia, Hunter syndrome, Krabbe disease, Maple syrup urine disease, metachromatic leukodystrophy, Niemann-Pick, Gaucher's disease, hemochromatosis, phenylketonuria (PKU), mitochondrial disorders, Porphyria, Tay-Sachs disease, Wilson's disease)

### BRIEF DESCRIPTION OF THE DRAWINGS

[0026] FIG. 1 shows the adeno-associated virus (AAV) transduction mechanism, which results in production of mRNA from the transgene.

[0027] FIG. 2 shows a graph that can demonstrate that mRNA-based selection of AAV variants can be more stringent than DNA-based selection. The virus library was expressed under the control of a CMV promoter.

[0028] FIGS. 3A-3B show graphs that can demonstrate a correlation between the virus library and vector genome DNA (FIG. 3A) and mRNA (FIG. 3B) in the liver.

[0029] FIGS. 4A-4F show graphs that can demonstrate capsid variants present at the DNA level and expressed at the mRNA level identified in different tissues. For this experiment, the virus library was expressed under the control of a CMV promoter.

[0030] FIGS. 5A-5C show graphs that can demonstrate capsid mRNA expression in different tissues under the control of cell-type specific promoters (as noted on x-axis). CMV was included as an exemplary constitutive promoter. CK8 is a muscle-specific promoter. MHCK7 is a muscle-specific promoter. hSyn is a neuron specific promoter. Expression levels from the cell type-specific promoters have been normalized based on expression levels from the constitutive CMV promoter in each tissue.

[0031] FIGS. 6A-6B show (FIG. 6A) a schematic demonstrating embodiments of a method of producing and selecting capsid variants for tissue-specific gene delivery across species and (FIG. 6B) a schematic demonstrating benchmarking of the top selected capsids.

[0032] FIG. 7 shows a schematic demonstrating embodiments of generating an AAV capsid variant library, particularly insertion of a random n-mer (n=3-15 amino acids) into a wild-type AAV, e.g., AAV9.

[0033] FIG. 8 shows a schematic demonstrating embodiments of generating an AAV capsid variant library, particularly variant AAV particle production. Each capsid variant encapsulates its own coding sequence as the vector genome.

[0034] FIG. 9 shows schematic vector maps of representative AAV capsid plasmid library vectors (see e.g., FIG. 8) that can be used in an AAV vector system to generate an AAV capsid variant library.

[0035] FIG. 10 shows a graph that can demonstrate the viral titer (calculated as AAV9 vector genome/15 cm dish) produced by constructs containing different constitutive and celltype specific mammalian promoters.

[0036] FIGS. 11A-11B demonstrate superior function of HematoAAV variants. FIG. 11A provides a schematic for testing the HematoAAV variants in vitro. FIG. 11B shows results of testing HematoAAV variants.

[0037] FIG. 12 provides AAV9 variants sorted based on their ability to target hematopoietic or progenitor cells. A pooled library of AAV9 capsid variants that differ within an inserted 7-mer region was generated and the library of variants was screened to identify variants that specifically target human and mouse hematopoietic cells in vivo.

[0038] FIG. 13 depicts a self-complementary Cbh-Gfp transfer vector used for AAV production.

[0039] FIG. 14 provides a table summarizing production yields of variant AAVs quantified using qPCR detection of the BGh vector element.

[0040] FIGS. 15A-15B provide data from a bioactivity assay to assess the functionality of HematoAAV variants. K562 cells were transduced at 1×10⁵ vg/cell using the indicated HematoAAV capsid carrying a Cbh-Gfp expression cassette, and compared to the parental vector (AAV9, produced in two independent batches). FIG. 15A provides data representing the % of live cells expressing GFP 2 days after AAV exposure. FIG. 15B provides data representing the Median Fluorescence Intensity for GFP among cells gated as positive for GFP expression.

[0041] FIGS. 16A-16B demonstrate in vitro transduction of human peripheral blood mononuclear cells (PBMCs) with S1-MF1-B S2-MF1-E, or AAV9. PBMCs from a single human donor were exposed in culture to the indicated AAV variants carrying Cbh-Gfp gene transfer vector. Two different vector doses were tested (1e5vg/cell (FIG. 16A) or 5e5 vg/cell (FIG. 16B)). 41 hours after AAV exposure, cells were harvested for flow cytometry. Plots were gated to exclude dead cells and debris and then selected for the indicated cell surface markers to identify the specific cell populations noted and analyzed for % GFP+.

[0042] FIGS. 17A-17C identify motifs of interest enriched in human and mouse bone marrow cells. FIG. 17A provides motifs of interest identified from a first screen of human and mouse bone marrow cells and FIG. 17B provides motifs of interest identified from a second screen of human and mouse bone marrow cells. Motifs of interest that were identified in both human and mouse bone marrow cells were also identified. FIG. 17C provides a list of motifs of interest that were identified throughout the first screen and the second screen.

### DETAILED DESCRIPTION OF THE INVENTION

### General Definitions

[0043] Unless defined otherwise, technical and scientific terms used herein have the same meaning as commonly understood by one of ordinary skill in the art to which this disclosure pertains. Definitions of common terms and techniques in molecular biology may be found in Molecular Cloning: A Laboratory Manual, 2^{nd} edition (1989) (Sambrook, Fritsch, and Maniatis); Molecular Cloning: A Laboratory Manual, 4^{th} edition (2012) (Green and Sambrook); Current Protocols in Molecular Biology (1987) (F. M. Ausubel et al. eds.); the series Methods in Enzymology (Academic Press, Inc.): PCR 2: A Practical Approach (1995) (M. J. MacPherson, B. D. Hames, and G. R. Taylor eds.): Antibodies, A Laboratory Manual (1988) (Harlow and Lane, eds.): Antibodies A Laboratory Manual, 2^{nd} edition 2013 (E. A. Greenfield ed.); Animal Cell Culture (1987) (R. I. Freshney, ed.); Benjamin Lewin, Genes IX, published by Jones and Bartlet, 2008 (ISBN 0763752223); Kendrew et al. (eds.), The Encyclopedia of Molecular Biology, published by Blackwell Science Ltd., 1994 (ISBN 0632021829); Robert A. Meyers (ed.), Molecular Biology and Biotechnology: a Comprehensive Desk Reference, published by VCH Publishers, Inc., 1995 (ISBN 9780471185710); Singleton et al., Dictionary of Microbiology and Molecular Biology 2nd ed., J. Wiley & Sons (New York, N.Y. 1994), March, Advanced Organic Chemistry Reactions, Mechanisms and Structure 4th ed., John Wiley & Sons (New York, N.Y. 1992); and Marten H. Hofker and Jan van Deursen, Transgenic Mouse Methods and Protocols, 2^{nd} edition (2011).

[0044] As used herein, the singular forms “a”, “an”, and “the” include both singular and plural referents unless the context clearly dictates otherwise.

[0045] The term “optional” or “optionally” means that the subsequent described event, circumstance or substituent may or may not occur, and that the description includes instances where the event or circumstance occurs and instances where it does not.

[0046] The recitation of numerical ranges by endpoints includes all numbers and fractions subsumed within the respective ranges, as well as the recited endpoints. It will be further understood that the endpoints of each of the ranges are significant both in relation to the other endpoint, and independently of the other endpoint. It is also understood that there are a number of values disclosed herein, and that each value is also herein disclosed as “about” that particular value in addition to the value itself. For example, if the value “10” is disclosed, then “about 10” is also disclosed. Ranges can be expressed herein as from “about” one particular value, and/or to “about” another particular value. Similarly, when values are expressed as approximations, by use of the antecedent “about,” it will be understood that the particular value forms a further embodiment. For example, if the value “about 10” is disclosed, then “10” is also disclosed.

[0047] It is to be understood that such a range format is used for convenience and brevity, and thus, should be interpreted in a flexible manner to include not only the numerical values explicitly recited as the limits of the range, but also to include all the individual numerical values or sub-ranges encompassed within that range as if each numerical value and sub-range is explicitly recited. To illustrate, a numerical range of “about 0.1% to 5%” should be interpreted to include not only the explicitly recited values of about 0.1% to about 5%, but also include individual values (e.g., about 1%, about 2%, about 3%, and about 4%) and the sub-ranges (e.g., about 0.5% to about 1.1%; about 5% to about 2.4%; about 0.5% to about 3.2%, and about 0.5% to about 4.4%, and other possible sub-ranges) within the indicated range. Where a range is expressed, a further embodiment includes from the one particular value and/or to the other particular value.

[0048] Where a range of values is provided, it is understood that each intervening value, to the tenth of the unit of the lower limit unless the context clearly dictates otherwise, between the upper and lower limit of that range and any other stated or intervening value in that stated range, is encompassed within the disclosure. The upper and lower limits of these smaller ranges may independently be included in the smaller ranges and are also encompassed within the disclosure, subject to any specifically excluded limit in the stated range. Where the stated range includes one or both of the limits, ranges excluding either or both of those included limits are also included in the disclosure. For example, where the stated range includes one or both of the limits, ranges excluding either or both of those included limits are also included in the disclosure, e.g., the phrase “x to y” includes the range from ‘x’ to ‘y’ as well as the range greater than ‘x’ and less than ‘y’. The range can also be expressed as an upper limit, e.g., ‘about x, y, z, or less' and should be interpreted to include the specific ranges of ‘about x’, ‘about y’, and ‘about z’ as well as the ranges of ‘less than x’, less than y’, and ‘less than z’. Likewise, the phrase ‘about x, y, z, or greater’ should be interpreted to include the specific ranges of ‘about x’, ‘about y’, and ‘about z’ as well as the ranges of ‘greater than x’, greater than y’, and ‘greater than z’. In addition, the phrase “about ‘x’ to ‘y’”, where ‘x’ and ‘y’ are numerical values, includes “about ‘x’ to about ‘y’”.

[0049] The terms “about” or “approximately” as used herein when referring to a measurable value such as a parameter, an amount, a temporal duration, and the like, are meant to encompass variations of and from the specified value, such as variations of +/−10% or less, +/−5% or less, +/−1% or less, and +/−0.1% or less of and from the specified value, insofar such variations are appropriate to perform in the disclosed invention. It is to be understood that the value to which the modifier “about” or “approximately” refers is itself also specifically, and preferably, disclosed. As used herein, the terms “about,” “approximate,” “at or about,” and “substantially” can mean that the amount or value in question can be the exact value or a value that provides equivalent results or effects as recited in the claims or taught herein. That is, it is understood that amounts, sizes, formulations, parameters, and other quantities and characteristics are not and need not be exact, but may be approximate and/or larger or smaller, as desired, reflecting tolerances, conversion factors, rounding off, measurement error and the like, and other factors known to those of skill in the art such that equivalent results or effects are obtained. In some circumstances, the value that provides equivalent results or effects cannot be reasonably determined. In general, an amount, size, formulation, parameter or other quantity or characteristic is “about,” “approximate,” or “at or about” whether or not expressly stated to be such. It is understood that where “about,” “approximate,” or “at or about” is used before a quantitative value, the parameter also includes the specific quantitative value itself, unless specifically stated otherwise.

[0050] As used herein, a “biological sample” may contain whole cells and/or live cells and/or cell debris. The biological sample may contain (or be derived from) a “bodily fluid”. The present invention encompasses embodiments wherein the bodily fluid is selected from amniotic fluid, aqueous humour, vitreous humour, bile, blood serum, breast milk, cerebrospinal fluid, cerumen (earwax), chyle, chyme, endolymph, perilymph, exudates, feces, female ejaculate, gastric acid, gastric juice, lymph, mucus (including nasal drainage and phlegm), pericardial fluid, peritoneal fluid, pleural fluid, pus, rheum, saliva, sebum (skin oil), semen, sputum, synovial fluid, sweat, tears, urine, vaginal secretion, vomit and mixtures of one or more thereof. Biological samples include cell cultures, bodily fluids, cell cultures from bodily fluids. Bodily fluids may be obtained from a mammal organism, for example by puncture, or other collecting or sampling procedures.

[0051] The terms “subject,” “individual,” and “patient” are used interchangeably herein to refer to a vertebrate, preferably a mammal, more preferably a human. Mammals include, but are not limited to, murines, simians, humans, farm animals, sport animals, and pets. Tissues, cells and their progeny of a biological entity obtained in vivo or cultured in vitro are also encompassed.

[0052] Various embodiments are described hereinafter. It should be noted that the specific embodiments are not intended as an exhaustive description or as a limitation to the broader embodiments discussed herein. One embodiment described in conjunction with a particular embodiment is not necessarily limited to that embodiment and can be practiced with any other embodiment(s). Reference throughout this specification to “one embodiment,” “an embodiment,” “an example embodiment,” means that a particular feature, structure or characteristic described in connection with the embodiment is included in at least one embodiment of the present invention. Thus, appearances of the phrases “in one embodiment,” “in an embodiment,” or “an example embodiment” in various places throughout this specification are not necessarily all referring to the same embodiment but may. Furthermore, the particular features, structures or characteristics may be combined in any suitable manner, as would be apparent to a person skilled in the art from this disclosure, in one or more embodiments. Furthermore, while some embodiments described herein include some, but not other features included in other embodiments, combinations of features of different embodiments are meant to be within the scope of the invention. For example, in the appended claims, any of the claimed embodiments can be used in any combination.

[0053] All publications, published patent documents, and patent applications cited herein are hereby incorporated by reference to the same extent as though each individual publication, published patent document, or patent application was specifically and individually indicated as being incorporated by reference.

### Overview

[0054] Embodiments disclosed herein provide hematopoietic cell-specific targeting moieties that can be coupled to or otherwise associated with a cargo. Embodiments disclosed herein provide polypeptides and particles that can incorporate one or more of the hematopoietic cell-specific targeting moieties. The polypeptides and/or particles can be coupled to, attached to, encapsulate, or otherwise incorporate a cargo, thereby associating the cargo with the targeting moiety(ies).

[0055] Embodiments disclosed herein provide hematopoietic cell-specific targeting moieties that can contain one or more of an n-mer motif as further described herein. In some embodiments, the n-mer motif is an enhanced hematoAAV motif. In some embodiments, the n-mer motif can confer hematopoietic cell-specificity of the targeting moiety.

[0056] Embodiments disclosed herein provide engineered adeno-associated virus (AAV) capsids that can be engineered to confer cell type-specific and/or species-specific tropism to an engineered AAV particle.

[0057] Embodiments disclosed herein also provide methods of generating the rAAVs having engineered capsids that can involve systematically directing the generation of diverse libraries of variants of modified surface structures, such as variant capsid proteins. Embodiments of the method of generating rAAVs having engineered capsids can also include stringent selection of capsid variants capable of targeting a specific cell, tissue, and/or organ type. Embodiments of the method of generating rAAVs having engineered capsids can include stringent selection of capsid variants capable of efficient, selective and/or homogenous transduction in at least one or more species.

[0058] Embodiments disclosed herein provide vectors and systems thereof capable of producing an engineered AAV described herein.

[0059] Embodiments disclosed herein provide cells that can be capable of producing the engineered AAV particles described herein. In some embodiments, the cells include one or more vectors or system thereof described herein.

[0060] Embodiments disclosed herein provide engineered AAVs that can include an engineered capsid described herein. In some embodiments, the engineered AAV can include a cargo polynucleotide to be delivered to a cell. In some embodiments, the cargo polynucleotide is a gene modification polynucleotide.

[0061] Embodiments disclosed herein provide formulations that can contain an engineered AAV vector or system thereof, an engineered AAV capsid, engineered AAV particles including an engineered AAV capsid described herein, and/or an engineered cell described herein that contains an engineered AAV capsid, and/or an engineered AAV vector or system thereof. In some embodiments, the formulation can also include a pharmaceutically acceptable carrier. The formulations described herein can be delivered to a subject in need thereof or a cell.

[0062] Embodiments disclosed herein also provide kits that contain one or more of the one or more of the polypeptides, polynucleotides, vectors, engineered AAV capsids, engineered AAV particles, cells, or other components described herein and combinations thereof and pharmaceutical formulations described herein. In embodiments, one or more of the polypeptides, polynucleotides, vectors, engineered AAV capsids, engineered AAV particles cells, and combinations thereof described herein can be presented as a combination kit Embodiments disclosed herein provide methods of using the engineered AAVs having a cell-specific tropism described herein to deliver, for example, a therapeutic polynucleotide to a cell. In this way, the engineered AAVs described herein can be used to treat and/or prevent a disease in a subject in need thereof.

[0063] Embodiments disclosed herein also provide methods of delivering the engineered AAV capsids, engineered AAV virus particles, engineered AAV vectors or systems thereof and/or formulations thereof to a cell. Also provided herein are methods of treating a subject in need thereof by delivering an engineered AAV particle, engineered AAV capsid, engineered AAV capsid vector or system thereof, an engineered cell, and/or formulation thereof to the subject. Embodiments disclosed herein provide methods of using the engineered AAVs having a cell-specific tropism described herein to deliver, for example, a polynucleotide designed to alter cell signaling/cell function to a cell. In this way, the engineered AAVs described herein can be used to discover a disease mechanism.

[0064] Additional features and advantages of the embodiments engineered AAVs and methods of making and using the engineered AAVs are further described herein.

### Hematopoietic Cell-Specific Targeting Moieties and Compositions Thereof

[0065] Described herein are targeting moieties that can be capable of specifically targeting, binding, associating with, or otherwise interact specifically with a cell (e.g., a hematopoietic cell or a cell found within a hematopoietic organ, such as a stromal and/or endothelial cell). In some embodiments, the targeting moiety can be or include an n-mer motif.

[0066] In some embodiments, the targeting moiety can include more than one n-mer motifs. In some embodiments, the targeting moiety can include 1, 2, 3, 4, 5, 6, 7, 8, 9, 10 or more n-mer motifs. In some embodiments, all the n-mer motifs included in the targeting moiety can be the same. In some embodiments where more than one n-mer motif is included, at least two of the n-mer motifs are different from each other. In some embodiments where more than one n-mer motif is included, all the n-mer motifs are different from each other. In some embodiments, each n-mer motif included in the targeting moiety can be any one of those set forth in FIG. 12 or set forth elsewhere herein. In some embodiments, each n-mer motif included in the targeting moiety can comprise or consist of VKXₙ, wherein Xₙ is each selected from any amino acid, wherein n is 1, 2, 3, 4, 5, 6, or 7. In some embodiments, each n-mer motif included in the targeting moiety comprises or consists of VKXₙYGAL, wherein Xₙ is each selected from any amino acid, wherein n is 1, 2, or 3.

[0067] In some embodiments, the first 1, 2, 3, or 4 amino acids of an n-mer motif can replace 1, 2, 3, or 4 amino acids of a polypeptide into which it is inserted and preceding the insertion site. For example, in one or more of the 7-mer inserts shown in e.g., FIG. 12, the first three amino acids shown can replace 1-3 amino acids into a polypeptide to which they may be inserted. Using an AAV as another non-limiting example, one or more of the n-mer motifs can be inserted into e.g., and AAV9 capsid prolylpeptide between amino acids 587 and 588 and between amino acids 588 and 589 and the insert can replace amino acids 586, 587, and 588 such that the amino acid immediately preceding the n-mer motif after insertion is residue 585. It will be appreciated that this principle can apply in any other insertion context and is not necessarily limited to insertion between residues 587 and 588 or between residues 588 and 589 of an AAV9 capsid or equivalent position in another AAV capsid. It will further be appreciated that in some embodiments, no amino acids in the polypeptide into which the n-mer motif is inserted are replaced by the n-mer motif.

[0068] The hematopoietic cell-specific targeting moiety can be coupled to or otherwise associated with a cargo. In some embodiments, one or more hematopoietic cell-specific targeting moieties described herein is directly attached to the cargo. In some embodiments, one or more hematopoietic cell-specific targeting moieties described herein is indirectly coupled to the cargo, such as via a linker molecule. In some embodiments, one or more hematopoietic cell-specific targeting moieties described herein is coupled to or associated with a polypeptide or other particle that is coupled to, attached to, encapsulates, and/or contains a cargo.

[0069] Exemplary particles include, without limitation, viral particles (e.g., viral capsids, which is inclusive of bacteriophage capsids), polysomes, liposomes, nanoparticles, microparticles, exosomes, micelles, and the like. The term “nanoparticle” as used herein includes a nanoscale deposit of a homogenous or heterogeneous material. Nanoparticles may be regular or irregular in shape and may be formed from a plurality of co-deposited particles that form a composite nanoscale particle. Nanoparticles may be generally spherical in shape or have a composite shape formed from a plurality of co-deposited generally spherical particles. Exemplary shapes for the nanoparticles include, but are not limited to, spherical, rod, elliptical, cylindrical, disc, and the like. In some embodiments, the nanoparticles have a substantially spherical shape.

[0070] As used herein, the term “specific” when used in relation to describe an interaction between two moieties, refers to non-covalent physical association of a first and a second moiety wherein the association between the first and second moieties is at least 2 times as strong, at least 5 times as strong, at least 10 times as strong, at least 50 times as strong, at least 100 times as strong, or stronger than the association of either moiety with most or all other moieties present in the environment in which binding occurs. Binding of two or more entities may be considered specific if the equilibrium dissociation constant, Kd, is 10⁻³ M or less, 10⁻⁴ M or less, 10⁻⁵ M or less, 10⁻⁶ M or less, 10⁻⁷ M or less, 10⁻⁸ M or less, 10⁻⁹ M or less, 10⁻¹⁰ M or less, 10⁻¹¹ M or less, or 10⁻¹² M or less under the conditions employed, e.g., under physiological conditions such as those inside a cell or inside a vascular bed or lymphatic vessel, or inside a body tissue or organ, or consistent with cell survival. In some embodiments, specific binding can be accomplished by a plurality of weaker interactions (e.g., a plurality of individual interactions, wherein each individual interaction is characterized by a Kd of greater than 10⁻³ M). In some embodiments, specific binding, which can be referred to as “molecular recognition,” is a saturable binding interaction between two entities that is dependent on complementary orientation of functional groups on each entity. Examples of specific interactions include primer-polynucleotide interaction, aptamer-aptamer target interactions, antibody-antigen interactions, avidin-biotin interactions, ligand-receptor interactions, metal-chelate interactions, hybridization between complementary nucleic acids, etc. In some embodiments, in addition to the n-mer motif(s) the targeting moiety can include a polypeptide, a polynucleotide, a lipid, a polymer, a sugar, or a combination thereof.

[0071] In some embodiments, the targeting moiety is incorporated into a viral protein, such as a capsid protein, including but not limited to lentiviral, adenoviral, AAV, bacteriophage, retroviral proteins. In some embodiments, n-mer motif is located between two amino acids of the viral protein such that the n-mer motif is external (i.e., is presented on the surface of) to a viral capsid.

[0072] In some embodiments, the composition containing one or more of the hematopoietic cell-specific targeting moieties described herein has increased hematopoietic cell potency, hematopoietic cell specificity, reduced immunogenicity, or any combination thereof. As used herein the terms “hematopoietic cell specific”, “hematopoietic cell specificity”, “hematopoietic cell potency” and the like, refer to the increased specificity, selectivity, or potency, of the hematopoietic cell-specific targeting moieties and compositions incorporating said hematopoietic cell-specific targeting moieties of the present invention for hematopoietic cells relative to non-hematopoietic cells. Further, in some aspects, the hematopoietic cell-specific targeting moieties may distinguish one type of hematopoietic cell from a second type of hematopoietic cell. In some embodiments, the cell specificity, or selectivity, or potency, or a combination thereof of a hematopoietic cell-specific targeting moiety or composition incorporating a hematopoietic cell-specific targeting moiety described herein is at least 2 to at least 500 times more specific, selective, and/or potent for/in a hematopoietic cell relative to a non-hematopoietic cell. In some embodiments, the specificity, or selectivity, or potency of/in a hematopoietic cell-specific targeting moiety described herein is at least 2, to/or 3, 4, 5, 6, 7, 8, 9, 10, 11, 12, 13, 14, 15, 16, 17, 18, 19, 20, 21, 22, 23, 24, 25, 26, 27, 28, 29, 30, 31, 32, 33, 34, 35, 36, 37, 38, 39, 40, 41, 42, 43, 44, 45, 46, 47, 48, 49, 50, 51, 52, 53, 54, 55, 56, 57, 58, 59, 60, 61, 62, 63, 64, 65, 66, 67, 68, 69, 70, 71, 72, 73, 74, 75, 76, 77, 78, 79, 80, 81, 82, 83, 84, 85, 86, 87, 88, 89, 90, 91, 92, 93, 94, 95, 96, 97, 98, 99, 100, 101, 102, 103, 104, 105, 106, 107, 108, 109, 110, 111, 112, 113, 114, 115, 116, 117, 118, 119, 120, 121, 122, 123, 124, 125, 126, 127, 128, 129, 130, 131, 132, 133, 134, 135, 136, 137, 138, 139, 140, 141, 142, 143, 144, 145, 146, 147, 148, 149, 150, 151, 152, 153, 154, 155, 156, 157, 158, 159, 160, 161, 162, 163, 164, 165, 166, 167, 168, 169, 170, 171, 172, 173, 174, 175, 176, 177, 178, 179, 180, 181, 182, 183, 184, 185, 186, 187, 188, 189, 190, 191, 192, 193, 194, 195, 196, 197, 198, 199, 200, 201, 202, 203, 204, 205, 206, 207, 208, 209, 210, 211, 212, 213, 214, 215, 216, 217, 218, 219, 220, 221, 222, 223, 224, 225, 226, 227, 228, 229, 230, 231, 232, 233, 234, 235, 236, 237, 238, 239, 240, 241, 242, 243, 244, 245, 246, 247, 248, 249, 250, 251, 252, 253, 254, 255, 256, 257, 258, 259, 260, 261, 262, 263, 264, 265, 266, 267, 268, 269, 270, 271, 272, 273, 274, 275, 276, 277, 278, 279, 280, 281, 282, 283, 284, 285, 286, 287, 288, 289, 290, 291, 292, 293, 294, 295, 296, 297, 298, 299, 300, 301, 302, 303, 304, 305, 306, 307, 308, 309, 310, 311, 312, 313, 314, 315, 316, 317, 318, 319, 320, 321, 322, 323, 324, 325, 326, 327, 328, 329, 330, 331, 332, 333, 334, 335, 336, 337, 338, 339, 340, 341, 342, 343, 344, 345, 346, 347, 348, 349, 350, 351, 352, 353, 354, 355, 356, 357, 358, 359, 360, 361, 362, 363, 364, 365, 366, 367, 368, 369, 370, 371, 372, 373, 374, 375, 376, 377, 378, 379, 380, 381, 382, 383, 384, 385, 386, 387, 388, 389, 390, 391, 392, 393, 394, 395, 396, 397, 398, 399, 400, 401, 402, 403, 404, 405, 406, 407, 408, 409, 410, 411, 412, 413, 414, 415, 416, 417, 418, 419, 420, 421, 422, 423, 424, 425, 426, 427, 428, 429, 430, 431, 432, 433, 434, 435, 436, 437, 438, 439, 440, 441, 442, 443, 444, 445, 446, 447, 448, 449, 450, 451, 452, 453, 454, 455, 456, 457, 458, 459, 460, 461, 462, 463, 464, 465, 466, 467, 468, 469, 470, 471, 472, 473, 474, 475, 476, 477, 478, 479, 480, 481, 482, 483, 484, 485, 486, 487, 488, 489, 490, 491, 492, 493, 494, 495, 496, 497, 498, 499, 500 times more specific or selective for a hematopoietic cell relative to a non-hematopoietic cell or alternatively for a first hematopoietic cell relative to a second hematopoietic cell.

[0073] Stated in the alternative, in some embodiments, the hematopoietic cell-specific targeting moieties and/or compositions containing one or more of the hematopoietic cell-specific targeting moieties described herein has decreased non-hematopoietic cell potency, non-hematopoietic cell specificity, reduced immunogenicity, or any combination thereof. In some embodiments, the hematopoietic cell-specific targeting moieties and/or compositions containing one or more of the hematopoietic cell-specific targeting moieties described herein is at least 2 to at least 500 times less specific, less selective, and/or less potent for/in a non-hematopoietic cell relative to a hematopoietic cell. In some embodiments, the specificity, or selectivity, or potency of/in a hematopoietic cell-specific targeting moiety described herein is at least 2, to/or 3, 4, 5, 6, 7, 8, 9, 10, 11, 12, 13, 14, 15, 16, 17, 18, 19, 20, 21, 22, 23, 24, 25, 26, 27, 28, 29, 30, 31, 32, 33, 34, 35, 36, 37, 38, 39, 40, 41, 42, 43, 44, 45, 46, 47, 48, 49, 50, 51, 52, 53, 54, 55, 56, 57, 58, 59, 60, 61, 62, 63, 64, 65, 66, 67, 68, 69, 70, 71, 72, 73, 74, 75, 76, 77, 78, 79, 80, 81, 82, 83, 84, 85, 86, 87, 88, 89, 90, 91, 92, 93, 94, 95, 96, 97, 98, 99, 100, 101, 102, 103, 104, 105, 106, 107, 108, 109, 110, 111, 112, 113, 114, 115, 116, 117, 118, 119, 120, 121, 122, 123, 124, 125, 126, 127, 128, 129, 130, 131, 132, 133, 134, 135, 136, 137, 138, 139, 140, 141, 142, 143, 144, 145, 146, 147, 148, 149, 150, 151, 152, 153, 154, 155, 156, 157, 158, 159, 160, 161, 162, 163, 164, 165, 166, 167, 168, 169, 170, 171, 172, 173, 174, 175, 176, 177, 178, 179, 180, 181, 182, 183, 184, 185, 186, 187, 188, 189, 190, 191, 192, 193, 194, 195, 196, 197, 198, 199, 200, 201, 202, 203, 204, 205, 206, 207, 208, 209, 210, 211, 212, 213, 214, 215, 216, 217, 218, 219, 220, 221, 222, 223, 224, 225, 226, 227, 228, 229, 230, 231, 232, 233, 234, 235, 236, 237, 238, 239, 240, 241, 242, 243, 244, 245, 246, 247, 248, 249, 250, 251, 252, 253, 254, 255, 256, 257, 258, 259, 260, 261, 262, 263, 264, 265, 266, 267, 268, 269, 270, 271, 272, 273, 274, 275, 276, 277, 278, 279, 280, 281, 282, 283, 284, 285, 286, 287, 288, 289, 290, 291, 292, 293, 294, 295, 296, 297, 298, 299, 300, 301, 302, 303, 304, 305, 306, 307, 308, 309, 310, 311, 312, 313, 314, 315, 316, 317, 318, 319, 320, 321, 322, 323, 324, 325, 326, 327, 328, 329, 330, 331, 332, 333, 334, 335, 336, 337, 338, 339, 340, 341, 342, 343, 344, 345, 346, 347, 348, 349, 350, 351, 352, 353, 354, 355, 356, 357, 358, 359, 360, 361, 362, 363, 364, 365, 366, 367, 368, 369, 370, 371, 372, 373, 374, 375, 376, 377, 378, 379, 380, 381, 382, 383, 384, 385, 386, 387, 388, 389, 390, 391, 392, 393, 394, 395, 396, 397, 398, 399, 400, 401, 402, 403, 404, 405, 406, 407, 408, 409, 410, 411, 412, 413, 414, 415, 416, 417, 418, 419, 420, 421, 422, 423, 424, 425, 426, 427, 428, 429, 430, 431, 432, 433, 434, 435, 436, 437, 438, 439, 440, 441, 442, 443, 444, 445, 446, 447, 448, 449, 450, 451, 452, 453, 454, 455, 456, 457, 458, 459, 460, 461, 462, 463, 464, 465, 466, 467, 468, 469, 470, 471, 472, 473, 474, 475, 476, 477, 478, 479, 480, 481, 482, 483, 484, 485, 486, 487, 488, 489, 490, 491, 492, 493, 494, 495, 496, 497, 498, 499, 500 times less specific or selective for a non-hematopoietic cell relative to a hematopoietic cell.

[0074] Immunogenicity of the compositions incorporating a hematopoietic cell-specific targeting moiety can be reduced, for example, 1-100 or more fold. In some embodiments, immunogenicity is reduced 1 to/or 2, 3, 4, 5, 6, 7, 8, 9, 10, 11, 12, 13, 14, 15, 16, 17, 18, 19, 20, 21, 22, 23, 24, 25, 26, 27, 28, 29, 30, 31, 32, 33, 34, 35, 36, 37, 38, 39, 40, 41, 42, 43, 44, 45, 46, 47, 48, 49, 50, 51, 52, 53, 54, 55, 56, 57, 58, 59, 60, 61, 62, 63, 64, 65, 66, 67, 68, 69, 70, 71, 72, 73, 74, 75, 76, 77, 78, 79, 80, 81, 82, 83, 84, 85, 86, 87, 88, 89, 90, 91, 92, 93, 94, 95, 96, 97, 98, 99, 100 or more fold.

[0075] Cargos can include any molecule that is capable of being coupled to or associated with the muscle-specific targeting moieties described herein. Cargos can include, without limitation, nucleotides, oligonucleotides, polynucleotides, amino acids, peptides, polypeptides, riboproteins, lipids, sugars, pharmaceutically active agents (e.g., drugs, imaging and other diagnostic agents, and the like), chemical compounds, and combinations thereof. In some embodiments, the cargo is DNA, RNA, amino acids, peptides, polypeptides, antibodies, aptamers, ribozymes, guide sequences for ribozymes that inhibit translation or transcription of essential tumor proteins and genes, hormones, immunomodulators, antipyretics, anxiolytics, antipsychotics, analgesics, antispasmodics, anti-inflammatories, anti-histamines, anti-infectives, radiation sensitizers, chemotherapeutics, radioactive compounds, imaging agents, and combinations thereof.

[0076] In some embodiments, the cargo is capable of treating or preventing a blood disease or disorder. Non-limiting examples of blood diseases or disorders include HIV/AIDs, blood cancers (e.g., leukemia, lymphoma, myeloma, monoclonal gammopathy of undetermined significance (MGUS)), bleeding disorders (e.g., acquired platelet function defects, congenital platelet function defects, disseminated intravascular coagulation (DIC), prothrombin deficiency, factor V deficiency, factor VII deficiency, factor X deficiency, factor XI deficiency (hemophilia C), Glanzmann disease, hemophilia A, hemophilia B, idiopathic thrombocytopenic purpura (ITP), von Willebrand disease (types I, II, and/or III)), hemoglobinopathies (e.g., sickle cell disease (HbS), sickle cell trait (HbAS), sickle cell-hemoglobin C (HbSC), sickle cell-thalassemia (HbS and HbA), thalassemia (alpha thalassemia and beta thalassemia), hemoglobin C disease (HbCC), hemoglobin C trait (HbAC)), primary immunodeficiencies (e.g., autoimmune lymphoproliferative syndrome (ALPS), APS-1 (APECED), BENTA disease, caspase eight deficiency state (CEDS), CARD9 deficiency and other sydromes of susceptibility to candidiasis, chronic granulomatous disease (CGD), common variable immunodeficiency (CVID), congenital neutropenia syndromes, CTLA4 deficiency, DOCK8 deficiency, GATA2 deficiency, glycosylation disorders with immunodeficiency, hyper-immunoglobulin E syndromes (HIES), hyper-immunoglobulin M syndromes, interferon gamma deficiency, interleukin 12 deficiency, and interleukin 23 deficiency, leukocyte adhesion deficiency (LAD), LRBA deficiency, PI3 kinase disease, PLCG2-associated antibody deficiency and immune dysregulation (PLAID), severe combined immunodeficiency (SCID), STAT3 dominant-negative disease, STAT3 gain-of-function disease, wards, hypogammaglobulinemia, infections, myelokathexis (WHIM) syndrome, Wiskott-Aldrich syndrome (WAS), x-linked agammaglobulinemia (XLA), x-linked lymphoproliferative disease (XLP), XMEN disease), cytopenias (anemia, leukopenia, thrombocytopenia, pancytopenia, autoimmune cytopenia, refractory cytopenia), and/or storage and metabolic disorders (e.g., diabetes, familial hypercholesterolemia, Hunter syndrome, Krabbe disease, Maple syrup urine disease, metachromatic leukodystrophy, Niemann-Pick, Gaucher's disease, hemochromatosis, phenylketonuria (PKU), mitochondrial disorders, Porphyria, Tay-Sachs disease, Wilson's disease).

[0077] In some embodiments, the cargo is a morpholino, a peptide-linked morpholino, an antisense oligonucleotide, a PMO, a therapeutic transgene, a polynucleotide encoding a therapeutic polypeptide or peptide, a PPMO, one or more peptides, one or more polynucleotides encoding a CRISPR-Cas protein, a guide RNA, or both, a ribonucleoprotein, wherein the ribonucleoprotein comprises a CRISPR-Cas system molecule, a therapeutic transgene RNA, or other gene modifying or therapeutic RNA and/or protein, or any combination thereof.

### Engineered Viral Capsids and Encoding Polynucleotides

[0078] Described herein are various embodiments of engineered or variant viral capsids, such as adeno-associated virus (AAV) capsids, that can be engineered to confer cell-specific tropism, such as hematopoictic cell specific tropism, to an engineered viral particle. Engineered viral capsids can be lentiviral, retroviral, adenoviral, or AAV capsids. The engineered capsids can be included in an engineered virus particle (e.g., an engineered lentiviral, retroviral, adenoviral, or AAV virus particle), and can confer cell-specific tropism, reduced immunogenicity, or both to the engineered viral particle. The engineered or variant viral capsids described herein can include one or more engineered or variant viral capsid proteins described herein. The engineered or variant viral capsids described herein can contain a hematopoietic cell-specific targeting moiety containing or composed of an n-mer motif described elsewhere herein.

[0079] The engineered or variant viral capsid and/or capsid proteins can be encoded by one or more engineered or variant viral capsid polynucleotides. In some embodiments, the engineered viral capsid polynucleotide is an engineered AAV capsid polynucleotide, engineered lentiviral capsid polynucleotide, engineered retroviral capsid polynucleotide, or engineered adenovirus capsid polynucleotide. In some embodiments, an engineered viral capsid polynucleotide (e.g., an engineered AAV capsid polynucleotide, engineered lentiviral capsid polynucleotide, engineered retroviral capsid polynucleotide, or engineered adenovirus capsid polynucleotide) can include a 3′ polyadenylation signal. The polyadenylation signal can be an SV40 polyadenylation signal.

[0080] The engineered or variant viral capsids can be variants of wild-type viral capsid. For example, in some embodiments, the engineered AAV capsids can be variants of wild-type AAV capsids. In some embodiments, the wild-type AAV capsids can be composed of VP1, VP2, VP3 capsid proteins or a combination thereof. In other words, the engineered AAV capsids can include one or more variants of a wild-type VP1, wild-type VP2, and/or wild-type VP3 capsid proteins. In some embodiments, the serotype of the reference wild-type AAV capsid can be AAV-1, AAV-2, AAV-3, AAV-4, AAV-5, AAV-6, AAV-8, AAV-9 or any combination thereof. In some embodiments, the serotype of the wild-type AAV capsid can be AAV-9. The engineered AAV capsids can have a different tropism than that of the reference wild-type AAV capsid.

[0081] The engineered or variant viral capsid can contain 1-60 engineered capsid proteins. In some embodiments, the engineered viral capsids can contain 1, 2, 3, 4, 5, 6, 7, 8, 9, 10, 11, 12, 13, 14, 15, 16, 17, 18, 19, 20, 21, 22, 23, 24, 25, 26, 27, 28, 29, 30, 31, 32, 33, 34, 35, 36, 37, 38, 39, 40, 41, 42, 43, 44, 45, 46, 47, 48, 49, 50, 51, 52, 53, 54, 55, 56, 57, 58, 59, or 60 engineered capsid proteins. In some embodiments, the engineered viral capsid can contain 0-59 wild-type viral capsid proteins. In some embodiments, the engineered viral capsid can contain 0, 1, 2, 3, 4, 5, 6, 7, 8, 9, 10, 11, 12, 13, 14, 15, 16, 17, 18, 19, 20, 21, 2223, 24, 25, 26, 27, 28, 29, 30, 31, 32, 33, 34, 35, 36, 37, 38, 39, 40, 41, 42, 43, 44, 45, 46, 47, 48, 49, 50, 51, 52, 53, 54, 55, 56, 57, 58, or 59 wild-type viral capsid proteins.

[0082] In some embodiments, the engineered or variant AAV capsid can contain 1-60 engineered capsid proteins. In some embodiments, the engineered AAV capsids can contain 1, 2, 3, 4, 5, 6, 7, 8, 9, 10, 11, 12, 13, 14, 15, 16, 17, 18, 19, 20, 21, 22, 23, 24, 25, 26, 27, 28, 29, 30, 31, 32, 33, 34, 35, 36, 37, 38, 39, 40, 41, 42, 43, 44, 45, 46, 47, 48, 49, 50, 51, 52, 53, 54, 55, 56, 57, 58, 59, or 60 engineered capsid proteins. In some embodiments, the engineered AAV capsid can contain 0-59 wild-type AAV capsid proteins. In some embodiments, the engineered AAV capsid can contain 0, 1, 2, 3, 4, 5, 6, 7, 8, 9, 10, 11, 12, 13, 14, 15, 16, 17, 18, 19, 20, 21, 22, 23, 24, 25, 26, 27, 28, 29, 30, 31, 32, 33, 34, 35, 36, 37, 38, 39, 40, 41, 42, 43, 44, 45, 46, 47, 48, 49, 50, 51, 52, 53, 54, 55, 56, 57, 58, or 59 wild-type AAV capsid proteins.

[0083] In some embodiments, the engineered or variant viral capsid protein can have an n-mer amino acid motif, where n can be at least 3 amino acids. In some embodiments, n can be 3, 4, 5, 6, 7, 8, 9, 10, 11, 12, 13, 14, or 15 amino acids. In some embodiments, an engineered AAV capsid can have a 6-mer or 7-mer amino acid motif. In some embodiments, the n-mer amino acid motif can be inserted between two amino acids in the wild-type viral protein (VP) (or capsid protein). In some embodiments, the n-mer motif can be inserted between two amino acids in a variable amino acid region in a viral capsid protein.

[0084] In some embodiments, the n-mer motif can be inserted between two amino acids in a variable amino acid region in an AAV capsid protein. The core of each wild-type AAV viral protein contains an eight-stranded beta-barrel motif (betaB to betaI) and an alpha-helix (alphaA) that are conserved in autonomous parvovirus capsids (see e.g., DiMattia et al. 2012. J. Virol. 86(12):6947-6958). Structural variable regions (VRs) occur in the surface loops that connect the beta-strands, which cluster to produce local variations in the capsid surface. AAVs have 12 variable regions (also referred to as hypervariable regions) (see e.g., Weitzman and Linden. 2011. “Adeno-Associated Virus Biology.” In Snyder, R. O., Moullier, P. (eds.) Totowa, NJ: Humana Press). In some embodiments, one or more n-mer motifs can be inserted between two amino acids in one or more of the 12 variable regions in the wild-type AVV capsid proteins. In some embodiments, the one or more n-mer motifs can each be inserted between two amino acids in VR-I, VR-II, VR-III, VR-IV, VR-V, VR-VI, VR-VII, VR-VIII, VR-IX, VR-X, VR-XI, VR-XII, or a combination thereof. In some embodiments, the n-mer can be inserted between two amino acids in the VR-III of a capsid protein. In some embodiments, the n-mer can be inserted between two amino acids in the VR-VIII of a capsid protein. In some embodiments, the engineered capsid can have an n-mer inserted between any two contiguous amino acids between amino acids 262 and 269, between any two contiguous amino acids between amino acids 327 and 332, between any two contiguous amino acids between amino acids 382 and 386, between any two contiguous amino acids between amino acids 452 and 460, between any two contiguous amino acids between amino acids 488 and 505, between any two contiguous amino acids between amino acids 545 and 558, between any two contiguous amino acids between amino acids 581 and 593, between any two contiguous amino acids between amino acids 704 and 714 of an AAV9 viral protein.

[0085] In some embodiments, the engineered capsid can have an n-mer inserted between amino acids 588 and 589 of an AAV9 viral protein. In some embodiments, the engineered capsid can have an n-mer inserted between amino acids 587 and 588 of an AAV9 viral protein. In some embodiments, the engineered capsid can have a 7-mer motif inserted between amino acids 588 and 589 of an AAV9 viral protein. SEQ ID NO: 12001 is a reference AAV9 capsid sequence for at least referencing the insertion sites discussed above. It will be appreciated that n-mers can be inserted in analogous positions in AAV viral proteins of other serotypes. In some embodiments as previously discussed, the n-mer(s) can be inserted between any two contiguous amino acids within the AAV viral protein and in some embodiments the insertion is made in a variable region.

[0086] In some embodiments, the first 1, 2, 3, or 4 amino acids of an n-mer motif can replace 1, 2, 3, or 4 amino acids of a polypeptide into which it is inserted and preceding the insertion site. For example, in one or more of the 7-mer inserts shown in e.g., FIG. 12, the first three amino acids shown can replace 1-3 amino acids into a polypeptide to which they may be inserted. Using an AAV as another non-limiting example, one or more of the n-mer motifs can be inserted into e.g., an AAV9 capsid polypeptide between amino acids 587 and 588 or between amino acids 588 and 589 and the insert can replace amino acids 586, 587, and 588 such that the amino acid immediately preceding the n-mer motif after insertion is residue 585. It will be appreciated that this principle can apply in any other insertion context and is not necessarily limited to insertion between residues 587 and 588 or between residues 588 and 589 of an AAV9 capsid or equivalent position in another AAV capsid. It will further be appreciated that in some embodiments, no amino acids in the polypeptide into which the n-mer motif is inserted are replaced by the n-mer motif.

AAV9 capsid reference sequence.
SEQ ID NO: 12001
MAADGYLPDWLEDNLSEGIREWWALKPGAPQPKANQQHODNARGLVLPG
YKYLGPGNGLDKGEPVNAADAAALEHDKAYDQQLKAGDNPYLKYNHADA
EFQERLKEDTSFGGNLGRAVFQAKKRLLEPLGLVEEAAKTAPGKKRPVE
QSPQEPDSSAGIGKSGAQPAKKRLNFGQTGDTESVPDPQPIGEPPAAPS
GVGSLTMASGGGAPVADNNEGADGVGSSSGNWHCDSQWLGDRVITTSTR
TWALPTYNNHLYKQISNSTSGGSSNDNAYFGYSTPWGYFDFNRFHCHFS
PRDWQRLINNNWGFRPKRLNFKLFNIQVKEVTDNNGVKTIANNLTSTVQ
VFTDSDYQLPYVLGSAHEGCLPPFPADVFMIPQYGYLTLNDGSQAVGRS
SFYCLEYFPSQMLRTGNNFQFSYEFENVPFHSSYAHSQSLDRLMNPLID
QYLYYLSKTINGSGQNQQTLKFSVAGPSNMAVQGRNYIPGPSYRQQRVS
TTVTQNNNSEFAWPGASSWALNGRNSLMNPGPAMASHKEGEDRFFPLSG
SLIFGKQGTGRDNVDADKVMITNEEEIKTTNPVATESYGQVATNHQSAQ
AQAQTGWVQNQGILPGMVWQDRDVYLQGPIWAKIPHTDGNFHPSPLMGG
FGMKHPPPQILIKNTPVPADPPTAFNKDKLNSFITQYSTGQVSVEIEWE
LQKENSKRWNPEIQYTSNYYKSNNVEFAVNTEGVYSEPRPIGTRYLTRN
L

[0087] In some embodiments, the n-mer can be any amino acid motif as shown or encoded by a nucleic acid as shown in FIG. 12. In some embodiments, the n-mer includes VKXₙ, wherein each Xₙ is selected from any amino acid and n is 1, 2, 3, 4, 5, 6, or 7, and more specifically n is 5. In some embodiments, the n-mer includes VKXₙYGAL, wherein each Xₙ is selected from any amino acid and n is 1, 2, or 3, and more specifically n is 1. In some embodiments, insertion of the n-mer in an AAV or other viral capsid can result in cell, tissue, organ, specific engineered AAV or other viral capsids or other compositions that include the n-mer motif or capsid proteins of the present invention. In some embodiments, the engineered or variant capsid or other composition containing an n-mer motif has a specificity for bone tissue and/or cells, lung tissue and/or cells, liver tissues and/or cells, bladder tissue and/or cells, kidney tissue and/or cells, cardiac tissue and/or cells, skeletal muscle tissue and/or cells, smooth muscle and/or cells, neuronal tissue and/or cells, intestinal tissue and/or cells, pancreas tissue and/or cells, adrenal gland tissue and/or cells, brain tissue and/or cells, tendon tissues or cells, skin tissues and/or cells, spleen tissue and/or cells, eye tissue and/or cells, blood or hematopoietic cells and/or hematopoietic organs, synovial fluid cells, immune cells (including specificity for particular types of immune cells), and combinations thereof. In some embodiments, the engineered capsid or other composition containing an n-mer motif has a specificity for hematopoietic cells.

[0088] In some embodiments, the AAV capsids or other viral capsids or compositions can be hematopoietic cell-specific. In some embodiments, cell-specificity of the engineered AAV or other viral capsid or other composition is conferred by a hematopoietic cell specific n-mer motif incorporated in the engineered or variant AAV or other viral capsid or other composition described herein. While not intending to be bound by theory, it is believed that the n-mer motif confers a 3D structure to or within a domain or region of the engineered AAV capsid or other viral capsid or other composition such that the interaction of the viral particle or other composition containing the engineered AAV capsid or other viral capsid or other composition described herein has increased or improved interactions (e.g., increased affinity) with a cell surface receptor and/or other molecule on the surface of a hematopoietic cell. In some embodiments, the cell surface receptor is AAV receptor (AAVR). In some embodiments, the cell surface receptor is a hematopoietic cell specific AAV receptor. In some embodiments, the cell surface receptor or other molecule is a cell surface receptor or other molecule selectively expressed on the surface of a hematopoietic cell.

[0089] In some embodiments, a hematopoietic cell specific engineered or variant viral particle or other composition described herein containing the hematopoietic cell-specific capsid, n-mer motif, or hematopoietic cell-specific targeting moiety described herein can have an increased uptake, delivery rate, transduction rate, efficiency, amount, or a combination thereof in a hematopoietic cell as compared to other cells types and/or other virus particles (including but not limited to AAVs) and other compositions that do not contain the hematopoietic cell-specific n-mer motif of the present invention.

[0090] Also described herein are polynucleotides that encode the engineered hematopoietic cell-specific targeting moieties and other compositions described herein (including, but not limited to, the engineered or variant AAV capsids) described herein.

[0091] In some embodiments, the engineered or variant polynucleotide can be included in a polynucleotide that is configured to be a viral genome donor in a viral vector system that can be used to generate engineered or variant viral particles described elsewhere herein.

[0092] In some embodiments, the engineered or variant AAV capsid encoding polynucleotide can be included in a polynucleotide that is configured to be an AAV genome donor in an AAV vector system that can be used to generate engineered AAV particles described elsewhere herein. In some embodiments, the engineered AAV capsid encoding polynucleotide can be operably coupled to a poly adenylation tail. In some embodiments, the poly adenylation tail can be an SV40 poly adenylation tail. In some embodiments, the AAV capsid encoding polynucleotide can be operably coupled to a promoter. In some embodiments, the promoter can be a tissue specific promoter. In some embodiments, the tissue specific promoter is specific for muscle (e.g., cardiac, skeletal, and/or smooth muscle), neurons and supporting cells (e.g., astrocytes, glial cells, Schwann cells, etc.), fat, spleen, liver, kidney, immune cells, spinal fluid cells, synovial fluid cells, skin cells, cartilage, tendons, connective tissue, bone, pancreas, adrenal gland, blood cell, bone marrow cells, thymic cells, lymph node cells, placenta, endothelial cells, and combinations thereof. In some embodiments, the promoter can be a constitutive promoter. Suitable promoters are discussed elsewhere herein and are generally known in the art and can be commercially available.

[0093] Suitable endothelial cell specific promoters include, but are not limited to, Fit-1 promoter and ICAM-2 promoter.

[0094] Suitable neuronal tissue/cell specific promoters include, but are not limited to, GFAP promoter (astrocytes), SYN1 promoter (neurons), and NSE/RU5′ (mature neurons).

[0095] Suitable kidney specific promoters include, but are not limited to, NphsI promoter (podocytes).

[0096] Suitable bone specific promoters include, but are not limited to, OG-2 promoter (osteoblasts, odontoblasts).

[0097] Suitable lung specific promoters include, but are not limited to, SP-B prompter (lung).

[0098] Suitable liver specific promoters include, but are not limited to, SV40/Alb promoter.

[0099] Suitable heart specific promoters include, but are not limited to, alpha-MHC.

[0100] Suitable constitutive promoters include, but are not limited to CMV, RSV, SV40, EFlalpha, CAG, and beta-actin.

AAVs with Reduced Non-Hematopoietic Cell Specificity

[0101] In some embodiments, the n-mer motif(s) described herein are inserted into an AAV protein (e.g., an AAV capsid protein) that has reduced specificity (or no detectable, measurable, or clinically relevant interaction) for one or more non-hematopoietic cell types. Exemplary non-hematopoietic cell types include, but are not limited to, liver, kidney, lung, heart, spleen, central or peripheral nervous system cells, bone, immune, stomach, intestine, eye, skin cells and the like. In some embodiments, the non-hematopoietic cells are liver cells.

[0102] In certain example embodiments, the AAV capsid protein is an engineered AAV capsid protein having reduced or eliminated uptake in a non-hematopoietic cell as compared to a corresponding wild-type AAV capsid poly peptide.

[0103] In certain example embodiments, the non-hematopoietic cell is a liver cell.

[0104] In certain example embodiments, the wild-type capsid polypeptide is an AAV1, AAV2, AAV3, AAV4, AAV5, AAV6, AAV7, AAV8, AAV9, AAV rh.74, or AAV rh.10 capsid polypeptide.

[0105] In certain example embodiments, the engineered AAV capsid protein comprises one or more mutations that result in reduced or eliminated uptake in a non-hematopoietic cell.

[0106] In certain example embodiments, the one or more mutations are
[0107] a. in position 267,
[0108] b. in position 269,
[0109] c. in position 504,
[0110] d. in position 505,
[0111] e. in position 590,
[0112] f. or any combination thereof

[0113] in the AAV9 capsid protein (SEQ ID NO: 12001) or in one or more positions corresponding thereto in a non-AAV9 capsid polypeptide.

[0114] In certain example embodiments, the non-AAV9 capsid protein is an AAV1, AAV2, AAV3, AAV4, AAV5, AAV6, AAV7, AAV8, AAV rh.74, or AAV rh.10 capsid polypeptide.

[0115] In certain example embodiments, the mutation in position 267 in the AAV9 capsid protein (SEQ ID NO: 12001) or position corresponding thereto in a non-AAV9 capsid polypeptide is a G or X mutation to A, wherein X is any amino acid.

[0116] In certain example embodiments, the mutation in position 269 in the AAV9 capsid protein (SEQ ID NO: 12001) or position corresponding thereto in a non-AAV9 capsid polypeptide is an S or X to T mutation, wherein X is any amino acid.

[0117] In certain example embodiments, the mutation in position 504 in the AAV9 capsid protein (SEQ ID NO: 12001) or position corresponding thereto in a non-AAV9 capsid polypeptide is a G or X to A mutation, wherein X is any amino acid.

[0118] In certain example embodiments, the mutation in position 505 in the AAV9 capsid protein (SEQ ID NO: 12001) or position corresponding thereto in a non-AAV9 capsid polypeptide is a P or X to A mutation, wherein X is any amino acid.

[0119] In certain example embodiments, the mutation in position 590 in the AAV9 capsid protein (SEQ ID NO: 12001) or position corresponding thereto in a non-AAV9 capsid polypeptide is a Q or X to A mutation, wherein X is any amino acid.

[0120] In certain example embodiments, the engineered AAV capsid protein is an engineered AAV9 capsid polypeptide comprising a mutation at position 267, position 269 or both of a wild-type AAV9 capsid protein (SEQ ID NO: 12001), wherein the mutation at position 267 is a G to A mutation and wherein the mutation at position 269 is an S to T mutation.

[0121] In certain example embodiments, the engineered AAV capsid protein is an engineered AAV9 capsid polypeptide comprising a mutation at position 590 of a wild-type AAV9 capsid protein (SEQ ID NO: 12001), wherein the mutation at position 509 is a Q to A mutation.

[0122] In certain example embodiments, the engineered AAV capsid protein is an engineered AAV9 capsid polypeptide comprising a mutation at position 504, position 505, or both of a wild-type AAV9 capsid protein (SEQ ID NO: 12001), wherein the mutation at position 504 is a G to A mutation and wherein the mutation at position 505 is a P to A mutation.

[0123] In some embodiments, the AAV capsid protein in which the n-mer motif(s) can be inserted can be 80-100 (e.g., 80, 81, 82, 83, 84, 85, 86, 87, 88, 89, 90, 91, 92, 93, 94, 95, 96, 97, 98, 99, to/or 100) percent identical to SEQ ID NO: 4 or SEQ ID NO: 5 of International Patent Application Publication WO 2019/217911, which is incorporated herein in its entirety. These sequences are also incorporated herein as SEQ ID NOS: 12002 and 12003 respectively. It will be appreciated that when considering variants of these AAV9 capsid proteins with reduced liver specificity, that residues 267 and/or 269 must contain the relevant mutations or equivalents.

SEQ ID NO: 12002
Met Ala Ala Asp Gly Tyr Leu Pro Asp Trp Leu Glu Asp Asn Leu Ser
Glu Gly Ile Arg Glu Trp Trp Ala Leu Lys Pro Gly Ala Pro Gln Pro
Lys Ala Asn Gln Gln His Gln Asp Asn Ala Arg Gly Leu Val Leu Pro
Gly Tyr Lys Val Leu Gly Pro Gly Asn Gly Leu Asp Lys Gly Glu Pro
Val Asn Ala Ala Asp Ala Ala Ala Leu Glu His Asp Lys Ala Tyr Asp
Gln Gln Leu Lys Ala Gly Asp Asn Pro Tyr Leu Lys Tyr Asn His Ala
Asp Ala Glu Phe Gln Glu Arg Leu Lys Glu Asp Thr Ser Phe Gly Gly
Asn Leu Gly Arg Ala Val Phe Gln Ala Lys Lys Arg Leu Leu Glu Pro
Leu Gly Leu Val Glu Glu Ala Ala Lys Thr Ala Pro Gly Lys Lys Arg
Pro Val Glu Gln Ser Pro Gln Glu Pro Asp Ser Ser Ala Gly Ile Gly
Lys Ser Gly Ala Gln Pro Ala Lys Lys Arg Leu Asn Phe Gly Gln Thr
Gly Asp Thr Glu Ser Val Pro Asp Pro Gln Pro Ile Gly Glu Pro Pro
Ala Ala Pro Ser Gly Val Gly Ser Leu Thr Met Ala Ser Gly Gly Gly
Ala Pro Val Ala Asp Asn Asn Glu Gly Ala Asp Gly Val Gly Ser Ser
Ser Gly Asn Trp His Cys Asp Ser Gln Trp Leu Gly Asp Arg Val Ile
Thr Thr Ser Thr Arg Thr Trp Ala Leu Pro Thr Tyr Asn Asn His Leu
Tyr Lys Gln Ile Ser Asn Ser Thr Ser Gly Ala Ser Ser Asn Asp Asn
Ala Tyr Phe Gly Tyr Ser Thr Pro Trp Gly Tyr Phe Asp Phe Asn Arg
Phe His Cys His Phe Ser Pro Arg Asp Trp Gln Arg Leu Ile Asn Asn
Asn Trp Gly Phe Arg Pro Lys Arg Leu Asn Phe Lys Leu Phe Asn Ile
Gln Val Lys Glu Val Thr Asp Asn Asn Gly Val Lys Thr Ile Ala Asn
Asn Leu Thr Ser Thr Val Gln Val Phe Thr Asp Ser Asp Tyr Gln Leu
Pro Tyr Val Leu Gly Ser Ala His Glu Gly Cys Leu Pro Pro Phe Pro
Ala Asp Val Phe Met Ile Pro Gln Tyr Gly Tyr Leu Thr Leu Asn Asp
Gly Ser Gln Ala Val Gly Arg Ser Ser Phe Tyr Cys Leu Glu Tyr Phe
Pro Ser Gln Met Leu Arg Thr Gly Asn Asn Phe Gln Phe Ser Tyr Glu
Phe Glu Asn Val Pro Phe His Ser Ser Tyr Ala His Ser Gln Ser Leu
Asp Arg Leu Met Asn Pro Leu Ile Asp Gln Tyr Leu Tyr Tyr Leu Ser
Lys Thr Ile Asn Gly Ser Gly Gln Asn Gln Gln Thr Leu Lys Phe Ser
Val Ala Gly Pro Ser Asn Met Ala Val Gln Gly Arg Asn Tyr Ile Pro
Gly Pro Ser Tyr Arg Gln Gln Arg Val Ser Thr Thr Val Thr Gln Asn
Asn Asn Ser Glu Phe Ala Trp Pro Gly Ala Ser Ser Trp Ala Leu Asn
Gly Arg Asn Ser Leu Met Asn Pro Gly Pro Ala Met Ala Ser His Lys
Glu Gly Glu Asp Arg Phe Phe Pro Leu Ser Gly Ser Leu Ile Phe Gly
Lys Gln Gly Thr Gly Arg Asp Asn Val Asp Ala Asp Lys Val Met Ile
Thr Asn Glu Glu Glu Ile Lys Thr Thr Asn Pro Val Ala Thr Glu Ser
Tyr Gly Gln Val Ala Thr Asn His Gln Ser Ala Gln Ala Gln Ala Gln
Thr Gly Trp Val Gln Asn Gln Gly Ile Leu Pro Gly Met Val Trp Gln
Asp Arg Asp Val Tyr Leu Gln Gly Pro Ile Trp Ala Lys Ile Pro His
Thr Asp Gly Asn Phe His Pro Ser Pro Leu Met Gly Gly Phe Gly Met
Lys His Pro Pro Pro Gln Ile Leu Ile Lys Asn Thr Pro Val Pro Ala
Asp Pro Pro Thr Ala Phe Asn Lys Asp Lys Leu Asn Ser Phe Ile Thr
Gln Tyr Ser Thr Gly Gln Val Ser Val Glu Ile Glu Trp Glu Leu Gln
Lys Glu Asn Ser Lys Arg Trp Asn Pro Glu Ile Gln Tyr Thr Ser Asn
Tyr Tyr Lys Ser Asn Asn Val Glu Phe Ala Val Asn Thr Glu Gly Val
Tyr Ser Glu Pro Arg Pro Ile Gly Thr Arg Tyr Leu Thr Arg Asn Leu
SEQ ID NO: 12003
Met Ala Ala Asp Gly Tyr Leu Pro Asp Trp Leu Glu Asp Asn Leu Ser
Glu Gly Ile Arg Glu Trp Trp Ala Leu Lys Pro Gly Ala Pro Gln Pro
Lys Ala Asn Gln Gln His Gln Asp Asn Ala Arg Gly Leu Val Leu Pro
Gly Tyr Lys Val Leu Gly Pro Gly Asn Gly Leu Asp Lys Gly Glu Pro
Val Asn Ala Ala Asp Ala Ala Ala Leu Glu His Asp Lys Ala Tyr Asp
Gln Gln Leu Lys Ala Gly Asp Asn Pro Tyr Leu Lys Tyr Asn His Ala
Asp Ala Glu Phe Gln Glu Arg Leu Lys Glu Asp Thr Ser Phe Gly Gly
Asn Leu Gly Arg Ala Val Phe Gln Ala Lys Lys Arg Leu Leu Glu Pro
Leu Gly Leu Val Glu Glu Ala Ala Lys Thr Ala Pro Gly Lys Lys Arg
Pro Val Glu Gln Ser Pro Gln Glu Pro Asp Ser Ser Ala Gly Ile Gly
Lys Ser Gly Ala Gln Pro Ala Lys Lys Arg Leu Asn Phe Gly Gln Thr
Gly Asp Thr Glu Ser Val Pro Asp Pro Gln Pro Ile Gly Glu Pro Pro
Ala Ala Pro Ser Gly Val Gly Ser Leu Thr Met Ala Ser Gly Gly Gly
Ala Pro Val Ala Asp Asn Asn Glu Gly Ala Asp Gly Val Gly Ser Ser
Ser Gly Asn Trp His Cys Asp Ser Gln Trp Leu Gly Asp Arg Val Ile
Thr Thr Ser Thr Arg Thr Trp Ala Leu Pro Thr Tyr Asn Asn His Leu
Tyr Lys Gln Ile Ser Asn Ser Thr Ser Gly Ala Ser Thr Asn Asp Asn
Ala Tyr Phe Gly Tyr Ser Thr Pro Trp Gly Tyr Phe Asp Phe Asn Arg
Phe His Cys His Phe Ser Pro Arg Asp Trp Gln Arg Leu Ile Asn Asn
Asn Trp Gly Phe Arg Pro Lys Arg Leu Asn Phe Lys Leu Phe Asn Ile
Gln Val Lys Glu Val Thr Asp Asn Asn Gly Val Lys Thr Ile Ala Asn
Asn Leu Thr Ser Thr Val Gln Val Phe Thr Asp Ser Asp Tyr Gln Leu
Pro Tyr Val Leu Gly Ser Ala His Glu Gly Cys Leu Pro Pro Phe Pro
Ala Asp Val Phe Met Ile Pro Gln Tyr Gly Tyr Leu Thr Leu Asn Asp
Gly Ser Gln Ala Val Gly Arg Ser Ser Phe Tyr Cys Leu Glu Tyr Phe
Pro Ser Gln Met Leu Arg Thr Gly Asn Asn Phe Gln Phe Ser Tyr Glu
Phe Glu Asn Val Pro Phe His Ser Ser Tyr Ala His Ser Gln Ser Leu
Asp Arg Leu Met Asn Pro Leu Ile Asp Gln Tyr Leu Tyr Tyr Leu Ser
Lys Thr Ile Asn Gly Ser Gly Gln Asn Gln Gln Thr Leu Lys Phe Ser
Val Ala Gly Pro Ser Asn Met Ala Val Gln Gly Arg Asn Tyr Ile Pro
Gly Pro Ser Tyr Arg Gln Gln Arg Val Ser Thr Thr Val Thr Gln Asn
Asn Asn Ser Glu Phe Ala Trp Pro Gly Ala Ser Ser Trp Ala Leu Asn
Gly Arg Asn Ser Leu Met Asn Pro Gly Pro Ala Met Ala Ser His Lys
Glu Gly Glu Asp Arg Phe Phe Pro Leu Ser Gly Ser Leu Ile Phe Gly
Lys Gln Gly Thr Gly Arg Asp Asn Val Asp Ala Asp Lys Val Met Ile
Thr Asn Glu Glu Glu Ile Lys Thr Thr Asn Pro Val Ala Thr Glu Ser
Tyr Gly Gln Val Ala Thr Asn His Gln Ser Ala Gln Ala Gln Ala Gln
Thr Gly Trp Val Gln Asn Gln Gly Ile Leu Pro Gly Met Val Trp Gln
Asp Arg Asp Val Tyr Leu Gln Gly Pro Ile Trp Ala Lys Ile Pro His
Thr Asp Gly Asn Phe His Pro Ser Pro Leu Met Gly Gly Phe Gly Met
Lys His Pro Pro Pro Gln Ile Leu Ile Lys Asn Thr Pro Val Pro Ala
Asp Pro Pro Thr Ala Phe Asn Lys Asp Lys Leu Asn Ser Phe Ile Thr
Gln Tyr Ser Thr Gly Gln Val Ser Val Glu Ile Glu Trp Glu Leu Gln
Lys Glu Asn Ser Lys Arg Trp Asn Pro Glu Ile Gln Tyr Thr Ser Asn
Tyr Tyr Lys Ser Asn Asn Val Glu Phe Ala Val Asn Thr Glu Gly Val
Tyr Ser Glu Pro Arg Pro Ile Gly Thr Arg Tyr Leu Thr Arg Asn Leu

[0124] In some embodiments, the AAV capsid protein in which the n-mer motif(s) can be inserted can be 80-100 (e.g., 80, 81, 82, 83, 84, 85, 86, 87, 88, 89, 90, 91, 92, 93, 94, 95, 96, 97, 98, 99, to/or 100) percent identical to any of those described in Adachi et al., (Nat. Comm. 2014. 5:3075, DOI: 10.1038/ncomms4075) that have reduced specificity for a non-CNS cell, particularly a liver cell. Adachi et al., (Nat. Comm. 2014. 5:3075, DOI: 10.1038/ncomms4075) is incorporated by reference herein as if expressed in its entirety.

[0125] In some embodiments, the modified AAV can have about a 1, 2, 3, 4, 5, 6, 7, 8, 9, 10, 11, 12, 13, 14, 15, 16, 17, 18, 19, 20, 21, 22, 23, 24, 25, 26, 27, 28, 29, 30, 31, 32, 33, 34, 35, 36, 37, 38, 39, 40, 41, 42, 43, 44, 45, 46, 47, 48, 49, 50, 51, 52, 53, 54, 55, 56, 57, 58, 59, 60, 61, 62, 63, 64, 65, 66, 67, 68, 69, 70, 71, 72, 73, 74, 75, 76, 77, 78, 79, 80, 81, 82, 83, 84, 85, 86, 87, 88, 89, 90, 91, 92, 93, 94, 95, 96, 97, 98, 99, 100 percent or fold reduction in specificity for a non-hematopoietic cell as compared to a wild-type AAV or control. In some embodiments, the modified AAV can have no measurable or detectable uptake and/or expression in one or more non-hematopoietic cells.

### Methods of Generating Engineered AAV Capsids

[0126] Also provided herein are methods of generating engineered AAV capsids. The engineered AAV capsid variants can be variants of wild-type AAV capsids. FIGS. 6-8 can illustrate various embodiments of methods capable of generating engineered or variant AAV capsids with variant motifs described herein. Generally, an AAV capsid library can be generated by expressing engineered capsid vectors each containing an engineered AAV capsid polynucleotide previously described in an appropriate AAV producer cell line. See e.g., FIG. 8. It will be appreciated that although FIG. 8 shows a helper-dependent method of AAV particle production, it will be appreciated that this can be done via a helper-free method as well. This can generate an AAV capsid library that can contain one more desired cell-specific engineered AAV capsid variant. As shown in FIG. 6 the AAV capsid library can be administered to various non-human animals or non-human animals engrafted with human hematopoietic cells for a first round of mRNA-based selection. As shown in FIG. 1, the transduction process by AAVs and related vectors can result in the production of an mRNA molecule that is reflective of the genome of the virus that transduced the cell. mRNA based-selection can be more specific and effective to determine a virus particle capable of functionally transducing a cell because it is based on the functional product produced as opposed to just detecting the presence of a virus particle in the cell by measuring the presence of viral DNA.

[0127] After first-round administration, one or more engineered AAV virus particles having a desired capsid variant can then be used to form a filtered AAV capsid library. Desirable AAV virus particles can be identified by measuring the mRNA expression of the capsid variants and determining which variants are highly expressed in the desired cell type(s) as compared to non-desired cells type(s). Those that are highly expressed in the desired cell, tissue, and/or organ type are the desired AAV capsid variant particles. In some embodiments, the AAV capsid variant encoding polynucleotide is under control of a tissue-specific promoter that has selective activity in the desired cell, tissue, or organ.

[0128] The engineered AAV capsid variant particles identified from the first round can then be administered to various non-human animals or non-human animals engrafted with human hematopoietic cells. In some embodiments, the animals used in the second round of selection and identification are not the same as those animals used for first round selection and identification. Similar to round 1, after administration the top expressing variants in the desired cell, tissue, and/or organ type(s) can be identified by measuring viral mRNA expression in the cells. The top variants identified after round two can then be optionally barcoded and optionally pooled. In some embodiments, top variants from the second round can then be administered to a non-human primate to identify the top cell-specific variant(s), particularly if the end use for the top variant is in humans. Administration at each round can be systemic.

[0129] In some embodiments, the method of generating an AAV capsid variant can include the steps of: (a) expressing a vector system described herein that contains an engineered AAV capsid polynucleotide in a cell to produce engineered AAV virus particle capsid variants; (b) harvesting the engineered AAV virus particle capsid variants produced in step (a); (c) administering engineered AAV virus particle capsid variants to one or more first subjects, wherein the engineered AAV virus particle capsid variants are produced by expressing an engineered AAV capsid variant vector or system thereof in a cell and harvesting the engineered AAV virus particle capsid variants produced by the cell; and (d) identifying one or more engineered AAV capsid variants produced at a significantly high level by one or more specific cells or specific cell types or specific tissues/organs in the one or more first subjects. In this context, “significantly high” can refer to a titer that can range from between about 2×10¹¹ to about 6×10² vector genomes per 15 cm dish.

[0130] The method can further include the steps of (e) administering some or all engineered AAV virus particle capsid variants identified in step (d) to one or more second subjects; and (f) identifying one or more engineered AAV virus particle capsid variants produced at a significantly high level in one or more specific cells or specific cell types in the one or more second subjects. The cell in step (a) can be a prokaryotic cell or a eukaryotic cell. In some embodiments, the administration in step (c), step (e), or both is systemic. In some embodiments, one or more first subjects, one or more second subjects, or both, are non-human mammals or non-human mammals engrafted with human cells. In some embodiments, one or more first subjects. one or more second subjects, or both, are each independently selected from the group consisting of: a wild-type non-human mammal, a humanized non-human mammal, a disease-specific non-human mammal model, and a non-human primate.

[0131] In some embodiments, further optimization of the variant motifs can be performed.

[0132] The polynucleotides and vector systems described herein can also be used to generate viral particles and other compositions that can be generated to contain a cargo molecule that can be delivered to a cell.

### Engineered Vectors and Vector Systems

[0133] Also provided herein are vectors and vector systems that can contain one or more of the engineered polynucleotides described herein that can encode one or more of the n-mer motifs of the present invention, including but not limited to engineered viral polynucleotides (e.g., engineered AAV polynucleotides). In some embodiments, the polynucleotide(s) that can encode an n-mer motif of the present invention can be any as described in FIG. 12, and/or as described elsewhere herein. In some embodiments, the polynucleotide can encode any n-mer motif as set forth in FIG. 12, and/or as described elsewhere herein. As used in this context, engineered viral capsid polynucleotides refers to any one or more of the polynucleotides described herein capable of encoding an engineered viral capsid as described elsewhere herein and/or polynucleotide(s) capable of encoding one or more engineered viral capsid proteins described elsewhere herein. Further, where the vector includes an engineered viral capsid polynucleotide described herein, the vector can also be referred to and considered an engineered vector or system thereof although not specifically noted as such. In some embodiments, the vector can contain one or more polynucleotides encoding one or more elements of an engineered viral capsid described herein. The vectors and systems thereof can be useful in producing bacterial, fungal, yeast, plant cells, animal cells, and transgenic animals that can express one or more components of the engineered viral capsid, particle, or other compositions described herein. Within the scope of this disclosure are vectors containing one or more of the polynucleotide sequences described herein. One or more of the polynucleotides that are part of the engineered viral capsid and system thereof described herein can be included in a vector or vector system.

[0134] In some embodiments, the vector can include an engineered viral (e.g., AAV) capsid polynucleotide having a 3′ polyadenylation signal. In some embodiments, the 3′ polyadenylation is an SV40 polyadenylation signal. In some embodiments the vector does not have splice regulatory elements. In some embodiments, the vector includes one or more minimal splice regulatory elements. In some embodiments, the vector can further include a modified splice regulatory element, wherein the modification inactivates the splice regulatory element. In some embodiments, the modified splice regulatory element is a polynucleotide sequence sufficient to induce splicing, between a rep protein polynucleotide and the engineered viral (e.g., AAV) capsid protein variant polynucleotide. In some embodiments, the polynucleotide sequence can be sufficient to induce splicing is a splice acceptor or a splice donor. In some embodiments, the viral (e.g., AAV) capsid polynucleotide is an engineered viral (e.g., AAV) capsid polynucleotide as described elsewhere herein. In some embodiments, the vector does not include one or more minimal splice regulatory elements, modified splice regulatory agent, splice acceptor, and/or splice donor.

[0135] The vectors and/or vector systems can be used, for example, to express one or more of the engineered viral (e.g., AAV) capsid and/or other polynucleotides in a cell, such as a producer cell, to produce engineered viral (e.g., AAV) particles and/or other compositions (e.g., polypeptides, particles, etc.) containing an engineered viral (e.g., AAV) capsid or other composition containing an n-mer motif of the present invention described elsewhere herein. Other uses for the vectors and vector systems described herein are also within the scope of this disclosure. In some contexts which will be appreciated by those of ordinary skill in the art, “vector” can be a term of art to refer to a nucleic acid molecule capable of transporting another nucleic acid to which it has been linked. A vector can be a replicon, such as a plasmid, phage, or cosmid, into which another DNA segment may be inserted so as to bring about the replication of the inserted segment. Generally, a vector is capable of replication when associated with the proper control elements.

[0136] Vectors include, but are not limited to, nucleic acid molecules that are single-stranded, double-stranded, or partially double-stranded; nucleic acid molecules that comprise one or more free ends, no free ends (e.g., circular); nucleic acid molecules that comprise DNA, RNA, or both; and other varieties of polynucleotides known in the art. One type of vector is a “plasmid.” which refers to a circular double stranded DNA loop into which additional DNA segments can be inserted, such as by standard molecular cloning techniques. Another type of vector is a viral vector, wherein virally-derived DNA or RNA sequences are present in the vector for packaging into a virus (e.g., retroviruses, replication defective retroviruses, adenoviruses, replication defective adenoviruses, and adeno-associated viruses (AAVs)). Viral vectors also include polynucleotides carried by a virus for transfection into a host cell. Certain vectors are capable of autonomous replication in a host cell into which they are introduced (e.g., bacterial vectors having a bacterial origin of replication and episomal mammalian vectors). Other vectors (e.g., non-episomal mammalian vectors) are integrated into the genome of a host cell upon introduction into the host cell, and thereby are replicated along with the host genome. Moreover, certain vectors are capable of directing the expression of genes to which they are operatively-linked. Such vectors are referred to herein as “expression vectors.” Common expression vectors of utility in recombinant DNA techniques are often in the form of plasmids.

[0137] Recombinant expression vectors can be composed of a nucleic acid (e.g., a polynucleotide) of the invention in a form suitable for expression of the nucleic acid in a host cell, which means that the recombinant expression vectors include one or more regulatory elements, which can be selected on the basis of the host cells to be used for expression, that is operatively-linked to the nucleic acid sequence to be expressed. Within a recombinant expression vector, “operably linked” and “operatively-linked” are used interchangeably herein and further defined elsewhere herein. In the context of a vector, the term “operably linked” is intended to mean that the nucleotide sequence of interest is linked to the regulatory element(s) in a manner that allows for expression of the nucleotide sequence (e.g., in an in vitro transcription/translation system or in a host cell when the vector is introduced into the host cell). Advantageous vectors include adeno-associated viruses, and types of such vectors can also be selected for targeting particular types of cells, such as those engineered viral (e.g., AAV) vectors containing an engineered viral (e.g., AAV) capsid polynucleotide with a desired cell-specific tropism. These and other embodiments of the vectors and vector systems are described elsewhere herein.

[0138] In some embodiments, the vector can be a bicistronic vector. In some embodiments, a bicistronic vector can be used for one or more elements of the engineered viral (e.g., AAV) capsid system described herein. In some embodiments, expression of elements of the engineered viral (e.g., AAV) capsid system described herein can be driven by a suitable constitutive or tissue specific promoter. Where the element of the engineered viral (e.g., AAV) capsid system is an RNA, its expression can be driven by a Pol III promoter, such as a U6 promoter. In some embodiments, the two are combined.

### Cell-Based Vector Amplification and Expression

[0139] Vectors can be designed for expression of one or more elements of the engineered viral (e.g., AAV) capsid system or other compositions containing an n-mer motif of the present invention described herein (e.g., nucleic acid transcripts, proteins, enzymes, and combinations thereof) in a suitable host cell. In some embodiments, the suitable host cell is a prokaryotic cell. Suitable host cells include, but are not limited to, bacterial cells, yeast cells, insect cells, and mammalian cells. The vectors can be viral-based or non-viral based. In some embodiments, the suitable host cell is a eukaryotic cell. In some embodiments, the suitable host cell is a suitable bacterial cell. Suitable bacterial cells include, but are not limited to, bacterial cells from the bacteria of the species Escherichia coli. Many suitable strains of E. coli are known in the art for expression of vectors. These include, but are not limited to Pir1, Stbl2, Stbl3, Stbl4, TOP10, XL1 Blue, and XL10 Gold. In some embodiments, the host cell is a suitable insect cell. Suitable insect cells include those from Spodoptera frugiperda. Suitable strains of S. frugiperda cells include, but are not limited to, Sf9 and Sf21. In some embodiments, the host cell is a suitable yeast cell. In some embodiments, the yeast cell can be from Saccharomyces cerevisiae. In some embodiments, the host cell is a suitable mammalian cell. Many types of mammalian cells have been developed to express vectors. Suitable mammalian cells include, but are not limited to, HEK293, Chinese Hamster Ovary Cells (CHOs), mouse myeloma cells, HeLa, U2OS, A549, HT1080, CAD, P19, NIH 3T3, L929, N2a, MCF-7, Y79, SO-Rb50. HepG G2, DIKX-X11, J558L, Baby hamster kidney cells (BHK), and chicken embryo fibroblasts (CEFs). Suitable host cells are discussed further in Goeddel, GENE EXPRESSION TECHNOLOGY: METHODS IN ENZYMOLOGY 185, Academic Press, San Diego, Calif (1990).

[0140] In some embodiments, the vector can be ayeast expression vector. Examples of vectors for expression in yeast Saccharomyces cerevisiae include pYepSecl (Baldari, et al., 1987. EMBO J. 6: 229-234), pMFa (Kuijan and Herskowitz, 1982. Cell 30: 933-943), pJRY88 (Schultz et al., 1987. Gene 54: 113-123), pYES2 (Invitrogen Corporation, San Diego, Calif), and picZ (InVitrogen Corp, San Diego, Calif.). As used herein, a “yeast expression vector” refers to a nucleic acid that contains one or more sequences encoding an RNA and/or polypeptide and may further contain any desired elements that control the expression of the nucleic acid(s), as well as any elements that enable the replication and maintenance of the expression vector inside the yeast cell. Many suitable yeast expression vectors and features thereof are known in the art; for example, various vectors and techniques are illustrated in in Yeast Protocols, 2nd edition, Xiao, W., ed. (Humana Press, New York, 2007) and Buckholz, R. G. and Gleeson, M. A. (1991) Biotechnology (NY) 9(11): 1067-72. Yeast vectors can contain, without limitation, a centromeric (CEN) sequence, an autonomous replication sequence (ARS), a promoter, such as an RNA Polymerase III promoter, operably linked to a sequence or gene of interest, a terminator such as an RNA polymerase III terminator, an origin of replication, and a marker gene (e.g., auxotrophic, antibiotic, or other selectable markers). Examples of expression vectors for use in yeast may include plasmids, yeast artificial chromosomes, 2p plasmids, yeast integrative plasmids, yeast replicative plasmids, shuttle vectors, and episomal plasmids.

[0141] In some embodiments, the vector is a baculovirus vector or expression vector and can be suitable for expression of polynucleotides and/or proteins in insect cells. Baculovirus vectors available for expression of proteins in cultured insect cells (e.g., SF9 cells) include the pAc series (Smith, et al., 1983. Mol. Cell. Biol. 3: 2156-2165) and the pVL series (Lucklow and Summers, 1989. Virology 170: 31-39). rAAV (recombinant Adeno-associated viral) vectors are preferably produced in insect cells, e.g., Spodoptera frugiperda Sf9 insect cells, grown in serum-free suspension culture. Serum-free insect cells can be purchased from commercial vendors, e.g., Sigma Aldrich (EX-CELL 405).

[0142] In some embodiments, the vector is a mammalian expression vector. In some embodiments, the mammalian expression vector is capable of expressing one or more polynucleotides and/or polypeptides in a mammalian cell. Examples of mammalian expression vectors include, but are not limited to, pCDM8 (Seed, 1987. Nature 329: 840) and pMT2PC (Kaufman, et al., 1987. EMBO J. 6: 187-195). The mammalian expression vector can include one or more suitable regulatory elements capable of controlling expression of the one or more polynucleotides and/or proteins in the mammalian cell. For example, commonly used promoters are derived from polyoma, adenovirus 2, cytomegalovirus, simian virus 40, and others disclosed herein and known in the art. More detail on suitable regulatory elements are described elsewhere herein.

[0143] For other suitable expression vectors and vector systems for both prokaryotic and eukaryotic cells see, e.g., Chapters 16 and 17 of Sambrook, et al., MOLECULAR CLONING: A LABORATORY MANUAL. 2nd ed., Cold Spring Harbor Laboratory, Cold Spring Harbor Laboratory Press, Cold Spring Harbor, N.Y., 1989.

[0144] In some embodiments, the recombinant mammalian expression vector is capable of directing expression of the nucleic acid preferentially in a particular cell type (e.g., tissue-specific regulatory elements are used to express the nucleic acid). Tissue-specific regulatory elements are known in the art. Non-limiting examples of suitable tissue-specific promoters include the albumin promoter (liver-specific; Pinkert, et al., 1987. Genes Dev. 1: 268-277), lymphoid-specific promoters (Calame and Eaton, 1988. Adv. Immunol. 43: 235-275), in particular promoters of T cell receptors (Winoto and Baltimore, 1989. EMBO J 8: 729-733) and immunoglobulins (Baneiji, et al., 1983. Cell 33: 729-740; Queen and Baltimore, 1983. Cell 33: 741-748), neuron-specific promoters (e.g., the neurofilament promoter; Byrne and Ruddle, 1989. Proc. Natl. Acad. Sci. USA 86: 5473-5477), pancreas-specific promoters (Edlund, et al., 1985. Science 230: 912-916), and mammary gland-specific promoters (e.g., milk whey promoter; U.S. Pat. No. 4,873,316 and European Application Publication No. 264,166). Developmentally-regulated promoters are also encompassed, e.g., the murine hox promoters (Kessel and Gruss, 1990. Science 249: 374-379) and the α-fetoprotein promoter (Campes and Tilghman, 1989. Genes Dev. 3: 537-546). With regards to these prokaryotic and eukaryotic vectors, mention is made of U.S. Pat. No. 6,750,059, the contents of which are incorporated by reference herein in their entirety. Other embodiments can utilize viral vectors, with regards to which mention is made of U.S. patent application Ser. No. 13/092,085, the contents of which are incorporated by reference herein in their entirety. Tissue-specific regulatory elements are known in the art and in this regard, mention is made of U.S. Pat. No. 7,776,321, the contents of which are incorporated by reference herein in their entirety. In some embodiments, a regulatory element can be operably linked to one or more elements of an engineered AAV capsid system so as to drive expression of the one or more elements of the engineered AAV capsid system described herein.

[0145] Vectors may be introduced and propagated in a prokaryote or prokaryotic cell. In some embodiments, a prokaryote is used to amplify copies of a vector to be introduced into a eukaryotic cell or as an intermediate vector in the production of a vector to be introduced into a eukaryotic cell (e.g., amplifying a plasmid as part of a viral vector packaging system). In some embodiments, a prokaryote is used to amplify copies of a vector and express one or more nucleic acids, such as to provide a source of one or more proteins for delivery to a host cell or host organism.

[0146] In some embodiments, the vector can be a fusion vector or fusion expression vector. In some embodiments, fusion vectors add a number of amino acids to a protein encoded therein, such as to the amino terminus, carboxy terminus, or both of a recombinant protein. Such fusion vectors can serve one or more purposes, such as: (i) to increase expression of recombinant protein; (ii) to increase the solubility of the recombinant protein; and (iii) to aid in the purification of the recombinant protein by acting as a ligand in affinity purification. In some embodiments, expression of polynucleotides (such as non-coding polynucleotides) and proteins in prokaryotes can be carried out in Escherichia coli with vectors containing constitutive or inducible promoters directing the expression of either fusion or non-fusion polynucleotides and/or proteins. In some embodiments, the fusion expression vector can include a proteolytic cleavage site, which can be introduced at the junction of the fusion vector backbone or other fusion moiety and the recombinant polynucleotide or protein to enable separation of the recombinant polynucleotide or protein from the fusion vector backbone or other fusion moiety subsequent to purification of the fusion polynucleotide or protein. Such enzymes, and their cognate recognition sequences, include Factor Xa, thrombin and enterokinase. Example fusion expression vectors include pGEX (Pharmacia Biotech Inc; Smith and Johnson, 1988. Gene 67: 31-40), pMAL (New England Biolabs, Beverly, Mass.) and pRTT5 (Pharmacia, Piscataway, N.J.) that fuse glutathione S-transferase (GST), maltose E binding protein, or protein A, respectively, to the target recombinant protein. Examples of suitable inducible non-fusion E. coli expression vectors include pTrc (Amrann et al., (1988) Gene 69:301-315) and pET 11d (Studier et al., GENE EXPRESSION TECHNOLOGY: METHODS IN ENZYMOLOGY 185. Academic Press, San Diego, Calif (1990) 60-89).

[0147] In some embodiments, one or more vectors driving expression of one or more elements of an engineered or variant viral (e.g., AAV) capsid system or other composition containing an n-mer motif described herein are introduced into a host cell such that expression of the elements of the engineered delivery system described herein direct formation of an engineered viral (e.g., AAV) capsid system or other composition containing an n-mer motif described herein (including but not limited to an engineered gene transfer agent particle, which is described in greater detail elsewhere herein). For example, different elements of the engineered viral (e.g., AAV) capsid system or other composition containing an n-mer motif described herein can each be operably linked to separate regulatory elements on separate vectors. RNA(s) of different elements of the engineered delivery system described herein can be delivered to an animal or mammal or cell thereof to produce an animal or mammal or cell thereof that constitutively or inducibly or conditionally expresses different elements of the engineered viral (e.g., AAV) capsid system or other compositions containing an n-mer motif described herein that incorporates one or more elements of the engineered viral (e.g., AAV) capsid system or other compositions containing an n-mer motif described herein or contains one or more cells that incorporates and/or expresses one or more elements of the engineered viral (e.g., AAV) capsid system or other composition containing an n-mer motif described herein.

[0148] In some embodiments, two or more of the elements expressed from the same or different regulatory element(s), can be combined in a single vector, with one or more additional vectors providing any components of the system not included in the first vector. Engineered polynucleotides of the present invention that are combined in a single vector may be arranged in any suitable orientation, such as one element located 5′ with respect to (“upstream” of) or 3′ with respect to (“downstream” of) a second element. The coding sequence of one element may be located on the same or opposite strand of the coding sequence of a second element, and oriented in the same or opposite direction. In some embodiments, a single promoter drives expression of a transcript encoding one or more engineered viral (e.g., AAV) capsid proteins or other composition containing an n-mer motif described herein, embedded within one or more intron sequences (e.g., each in a different intron, two or more in at least one intron, or all in a single intron). In some embodiments, the engineered polynucleotides of the present invention (including but not limited to engineered viral polynucleotides) can be operably linked to and expressed from the same promoter.

### Vector Features

[0149] The vectors can include additional features that can confer one or more functionalities to the vector, the polynucleotide to be delivered, a virus particle produced there from, or polypeptide expressed thereof. Such features include, but are not limited to, regulatory elements, selectable markers, molecular identifiers (e.g., molecular barcodes), stabilizing elements, and the like. It will be appreciated by those skilled in the art that the design of the expression vector and additional features included can depend on such factors as the choice of the host cell to be transformed, the level of expression desired, etc.

### Regulatory Elements

[0150] In some embodiments, the polynucleotides and/or vectors thereof described herein (including, but not limited to, the engineered AAV capsid polynucleotides of the present invention) can include one or more regulatory elements that can be operatively linked to the polynucleotide. The term “regulatory element” is intended to include promoters, enhancers, internal ribosomal entry sites (IRES), and other expression control elements (e.g., transcription termination signals, such as polyadenylation signals and poly-U sequences). Such regulatory elements are described, for example, in Goeddel, GENE EXPRESSION TECHNOLOGY: METHODS IN ENZYMOLOGY 185, Academic Press, San Diego, Calif. (1990). Regulatory elements include those that direct constitutive expression of a nucleotide sequence in many types of host cell and those that direct expression of the nucleotide sequence only in certain host cells (e.g., tissue-specific regulatory sequences). A tissue-specific promoter can direct expression primarily in a desired tissue of interest, such as muscle, neuron, bone, skin, blood, specific organs (e.g., liver, pancreas), or particular cell types (e.g., lymphocytes). Regulatory elements may also direct expression in a temporal-dependent manner, such as in a cell-cycle dependent or developmental stage-dependent manner, which may or may not also be tissue or cell-type specific. In some embodiments, a vector comprises one or more pol III promoter (e.g., 1, 2, 3, 4, 5, or more pol III promoters), one or more pol II promoters (e.g., 1, 2, 3, 4, 5, or more pol II promoters), one or more pol I promoters (e.g., 1, 2, 3, 4, 5, or more pol I promoters), or combinations thereof. Examples of pol III promoters include, but are not limited to, U6 and H1 promoters. Examples of pol TT promoters include, but are not limited to, the retroviral Rous sarcoma virus (RSV) LTR promoter (optionally with the RSV enhancer), the cytomegalovirus (CMV) promoter (optionally with the CMV enhancer) (see, e.g., Boshart et al, Cell, 41:521-530 (1985)), the SV40 promoter, the dihydrofolate reductase promoter, the β-actin promoter, the phosphoglycerol kinase (PGK) promoter, and the EF1α promoter. Also encompassed by the term “regulatory element” are enhancer elements, such as WPRE; CMV enhancers; the R-U5′ segment in LTR of HTLV-I (Mol. Cell. Biol., Vol. 8(1), p. 466-472, 1988): SV40 enhancer; and the intron sequence between exons 2 and 3 of rabbit β-globin (Proc. Natl. Acad. Sci. USA., Vol. 78(3), p. 1527-31, 1981).

[0151] In some embodiments, the regulatory sequence can be a regulatory sequence described in U.S. Pat. No. 7,776,321, U.S. Pat. Pub. No. 2011/0027239, and PCT publication WO 2011/028929, the contents of which are incorporated by reference herein in their entirety. In some embodiments, the vector can contain a minimal promoter. In some embodiments, the minimal promoter is the Mecp2 promoter, tRNA promoter, or U6. In a further embodiment, the minimal promoter is tissue specific. In some embodiments, the length of the vector polynucleotide the minimal promoters and polynucleotide sequences is less than 4.4Kb.

[0152] To express a polynucleotide, the vector can include one or more transcriptional and/or translational initiation regulatory sequences, e.g., promoters, that direct the transcription of the gene and/or translation of the encoded protein in a cell. In some embodiments a constitutive promoter may be employed. Suitable constitutive promoters for mammalian cells are generally known in the art and include, but are not limited to SV40, CAG, CMV, EF-1α, β-actin, RSV, and PGK. Suitable constitutive promoters for bacterial cells, yeast cells, and fungal cells are generally known in the art, such as a T-7 promoter for bacterial expression and an alcohol dehydrogenase promoter for expression in yeast.

[0153] In some embodiments, the regulatory element can be a regulated promoter. “Regulated promoter” refers to promoters that direct gene expression not constitutively, but in a temporally- and/or spatially-regulated manner, and includes tissue-specific, tissue-preferred and inducible promoters. In some embodiments, the regulated promoter is a tissue specific promoter as previously discussed elsewhere herein. Regulated promoters include conditional promoters and inducible promoters. In some embodiments, conditional promoters can be employed to direct expression of a polynucleotide in a specific cell type, under certain environmental conditions, and/or during a specific state of development. Suitable tissue specific promoters can include, but are not limited to, liver specific promoters (e.g. APOA2, SERPIN A1 (hAAT), CYP3A4, and MIR122), pancreatic cell promoters (e.g. INS, IRS2, Pdx1, Alx3, Ppy), cardiac specific promoters (e.g. Myh6 (alpha MHC), MYL2 (MLC-2v), TNI3 (cTnl), NPPA (ANF), Slc8a1 (Ncx1)), central nervous system cell promoters (SYN1, GFAP, INA, NES. MOBP, MBP, TH, FOXA2 (HNF3 beta)), skin cell specific promoters (e.g. FLG, K14, TGM3), immune cell specific promoters, (e.g. ITGAM, CD43 promoter, CD14 promoter, CD45 promoter, CD68 promoter), urogenital cell specific promoters (e.g. Pbsn, Upk2, Sbp, Ferl14), endothelial cell specific promoters (e.g. ENG), pluripotent and embryonic germ layer cell specific promoters (e.g. Oct4, NANOG, Synthetic Oct4, T brachyury, NES, SOX17, FOXA2, MIR122), and muscle cell specific promoter (e.g. Desmin). Other tissue and/or cell specific promoters are discussed elsewhere herein and can be generally known in the art and are within the scope of this disclosure.

[0154] Inducible/conditional promoters can be positively inducible/conditional promoters (e.g. a promoter that activates transcription of the polynucleotide upon appropriate interaction with an activated activator, or an inducer (compound, environmental condition, or other stimulus) or a negative/conditional inducible promoter (e.g. a promoter that is repressed (e.g. bound by a repressor) until the repressor condition of the promotor is removed (e.g. inducer binds a repressor bound to the promoter stimulating release of the promoter by the repressor or removal of a chemical repressor from the promoter environment)). The inducer can be a compound, environmental condition, or other stimulus. Thus, inducible/conditional promoters can be responsive to any suitable stimuli such as chemical, biological, or other molecular agents, temperature, light, and/or pH. Suitable inducible/conditional promoters include, but are not limited to, Tet-On, Tet-Off, Lac promoter, pBad, AlcA, LexA, Hsp70 promoter, Hsp90 promoter, pDawn, XVE/OlexA, GVG, and pOp/LhGR.

[0155] Where expression in a plant cell is desired, the components of the engineered AAV capsid system described herein are typically placed under control of a plant promoter, i.e., a promoter operable in plant cells. The use of different types of promoters is envisaged. In some embodiments, inclusion of an engineered viral (e.g., AAV) capsid system vector in a plant can be for viral vector production purposes.

[0156] A constitutive plant promoter is a promoter that is able to express the open reading frame (ORF) that it controls in all or nearly all of the plant tissues during all or nearly all developmental stages of the plant (referred to as “constitutive expression”). One non-limiting example of a constitutive promoter is the cauliflower mosaic virus 35S promoter. Different promoters may direct the expression of a gene in different tissues or cell types, or at different stages of development, or in response to different environmental conditions. In particular embodiments, one or more of the engineered AAV capsid system components are expressed under the control of a constitutive promoter, such as the cauliflower mosaic virus 35S promoter issue-preferred promoters can be utilized to target enhanced expression in certain cell types within a particular plant tissue, for instance vascular cells in leaves or roots or in specific cells of the seed. Examples of particular promoters for use in the engineered AAV capsid system and other compositions of the present invention are found in Kawamata et al., (1997) Plant Cell Physiol 38:792-803; Yamamoto et al., (1997) Plant J 12:255-65; Hire et al. (1992) Plant Mol Biol 20:207-18, Kuster et al, (1995) Plant Mol Biol 29:759-72, and Capana et al., (1994) Plant Mol Biol 25:681-91.

[0157] Examples of promoters that are inducible and that can allow for spatiotemporal control of gene editing or gene expression may use a form of energy. The form of energy may include but is not limited to sound energy, electromagnetic radiation, chemical energy and/or thermal energy. Examples of inducible systems include tetracycline inducible promoters (Tet-On or Tet-Off), small molecule two-hybrid transcription activations systems (FKBP, ABA, etc.), or light inducible systems (Phytochrome, LOV domains, or cryptochrome)., such as a Light Inducible Transcriptional Effector (LITE) that direct changes in transcriptional activity in a sequence-specific manner. The components of a light inducible system may include one or more elements of the engineered AAV capsid system or other compositions of the present invention described herein, a light-responsive cytochrome heterodimer (e.g., from Arabidopsis thaliana), and a transcriptional activation/repression domain. In some embodiments, the vector can include one or more of the inducible DNA binding proteins provided in PCT publication WO 2014/018423 and US Publications, 2015/0291966, 2017/0166903, 2019/0203212, which describe, e.g., embodiments of inducible DNA binding proteins and methods of use and can be adapted for use with the present invention.

[0158] In some embodiments, transient or inducible expression can be achieved by including, for example, chemical-regulated promotors, i.e., whereby the application of an exogenous chemical induces gene expression. Modulation of gene expression can also be obtained by including a chemical-repressible promoter, where application of the chemical represses gene expression. Chemical-inducible promoters include, but are not limited to, the maize ln2-2 promoter, activated by benzene sulfonamide herbicide safeners (De Veylder et al., (1997) Plant Cell Physiol 38:568-77), the maize GST promoter (GST-ll-27, WO93/01294), activated by hydrophobic electrophilic compounds used as pre-emergent herbicides, and the tobacco PR-1 a promoter (Ono et al., (2004) Biosci Biotechnol Biochem 68:803-7) activated by salicylic acid. Promoters which, are regulated by antibiotics, such as tetracycline-inducible and tetracycline-repressible promoters (Gatz et al., (1991) Mol Gen Genet 227:229-37; U.S. Pat. Nos. 5,814,618 and 5,789,156) can also be used herein.

[0159] In some embodiments, the vector or system thereof can include one or more elements capable of translocating and/or expressing an engineered polynucleotide of the present invention (e.g., an engineered or variant viral (e.g., AAV) capsid polynucleotide) to/in a specific cell component or organelle. Such organelles can include, but are not limited to, nucleus, ribosome, endoplasmic reticulum, Golgi apparatus, chloroplast, mitochondria, vacuole, lysosome, cytoskeleton, plasma membrane, cell wall, peroxisome, centrioles, etc.

### Selectable Markers and Tags

[0160] One or more of the engineered polynucleotides of the present invention (e.g., an engineered or variant viral (e.g., AAV) capsid polynucleotide) can be operably linked, fused to, or otherwise modified to include a polynucleotide that encodes or is a selectable marker or tag, which can be a polynucleotide or polypeptide. In some embodiments, the polypeptide encoding a polypeptide selectable marker can be incorporated in the engineered polynucleotide of the present invention (e.g., an engineered or variant viral (e.g., AAV) capsid polynucleotide) such that the selectable marker polypeptide, when translated, is inserted between two amino acids between the N- and C-terminus of an engineered polypeptide (e.g., the engineered AAV capsid polypeptide) or at the N- and/or C-terminus of the engineered polypeptide (e.g., an engineered AAV capsid polypeptide). In some embodiments, the selectable marker or tag is a polynucleotide barcode or unique molecular identifier (UMI).

[0161] It will be appreciated that the polynucleotide encoding such selectable markers or tags can be incorporated into a polynucleotide encoding one or more components of the engineered AAV capsid system described herein in an appropriate manner to allow expression of the selectable marker or tag. Such techniques and methods are described elsewhere herein and will be instantly appreciated by one of ordinary skill in the art in view of this disclosure. Many such selectable markers and tags are generally known in the art and are intended to be within the scope of this disclosure.

[0162] Suitable selectable markers and tags include, but are not limited to, affinity tags, such as chitin binding protein (CBP), maltose binding protein (MBP), glutathione-S-transferase (GST), poly(His) tag; solubilization tags such as thioredoxin (TRX) and polv(NANP), MBP, and GST; chromatography tags such as those consisting of polvanionic amino acids, such as FLAG-tag; epitope tags such as V5-tag, Myc-tag, HA-tag and NE-tag; protein tags that can allow specific enzymatic modification (such as biotinylation by biotin ligase) or chemical modification (such as reaction with FlAsH-EDT2 for fluorescence imaging), DNA and/or RNA segments that contain restriction enzyme or other enzyme cleavage sites; DNA segments that encode products that provide resistance against otherwise toxic compounds including antibiotics, such as, spectinomycin, ampicillin, kanamycin, tetracycline, Basta, neomycin phosphotransferase II (NEO), hygromycin phosphotransferase (HPT)) and the like; DNA and/or RNA segments that encode products that are otherwise lacking in the recipient cell (e.g., tRNA genes, auxotrophic markers); DNA and/or RNA segments that encode products which can be readily identified (e.g., phenotypic markers such as β-galactosidase, GUS; fluorescent proteins such as green fluorescent protein (GFP), cyan (CFP), yellow (YFP), red (RFP), luciferase, and cell surface proteins); polynucleotides that can generate one or more new primer sites for PCR (e.g., the juxtaposition of two DNA sequences not previously juxtaposed), DNA sequences not acted upon or acted upon by a restriction endonuclease or other DNA modifying enzyme, chemical, etc.; epitope tags (e.g. GFP, FLAG- and His-tags), and, DNA sequences that make a molecular barcode or unique molecular identifier (UMI), DNA sequences required for a specific modification (e.g., methylation) that allows its identification. Other suitable markers will be appreciated by those of skill in the art.

[0163] Selectable markers and tags can be operably linked to one or more components of the engineered AAV capsid system or other compositions and/or systems described herein via suitable linker, such as a glycine or glycine serine linkers as short as GS or GG up to (GGGGG)₃ (SEQ ID NO: 12004) or (GGGGS)₃(SEQ ID NO: 12005). Other suitable linkers are described elsewhere herein.

[0164] The vector or vector system can include one or more polynucleotides encoding one or more targeting moieties. In some embodiments, the targeting moiety encoding polynucleotides can be included in the vector or vector system, such as a viral vector system, such that they are expressed within and/or on the virus particle(s) produced such that the virus particles can be targeted to specific cells, tissues, organs, etc. In some embodiments, the targeting moiety encoding polynucleotides can be included in the vector or vector system such that the engineered polynucleotide(s) of the present invention (e.g., an engineered viral (e.g., AAV) capsid polynucleotide(s)) and/or products expressed therefrom include the targeting moiety and can be targeted to specific cells, tissues, organs, etc. In some embodiments, such as non-viral carriers, the targeting moiety can be attached to the carrier (e.g., polymer, lipid, inorganic molecule etc.) and can be capable of targeting the carrier and any attached or associated engineered polynucleotide(s) of the present invention, the engineered polypeptides, or other compositions of the present invention described herein, to specific cells, tissues, organs, etc. In some embodiments, the specific cells are hematopoietic cells.

### Cell-Free Vector and Polynucleotide Expression

[0165] In some embodiments, the polynucleotide(s) encoding an n-mer motif of the present invention can be expressed from a vector or suitable polynucleotide in a cell-free in vitro system. In some embodiments, the polynucleotide encoding one or more features of the engineered AAV capsid system can be expressed from a vector or suitable polynucleotide in a cell-free in vitro system. In other words, the polynucleotide can be transcribed and optionally translated in vitro. In vitro transcription/translation systems and appropriate vectors are generally known in the art and commercially available. Generally, in vitro transcription and in vitro translation systems replicate the processes of RNA and protein synthesis, respectively, outside of the cellular environment. Vectors and suitable polynucleotides for in vitro transcription can include T7, SP6, T3, promoter regulatory sequences that can be recognized and acted upon by an appropriate polymerase to transcribe the polynucleotide or vector.

[0166] In vitro translation can be stand-alone (e.g., translation of a purified polyribonucleotide) or linked/coupled to transcription. In some embodiments, the cell-free (or in vitro) translation system can include extracts from rabbit reticulocytes, wheat germ, and/or E. coli. The extracts can include various macromolecular components that are needed for translation of exogenous RNA (e.g., 70S or 80S ribosomes, tRNAs, aminoacyl-tRNA, synthetases, initiation, elongation factors, termination factors, etc.). Other components can be included or added during the translation reaction, including but not limited to, amino acids, energy sources (ATP, GTP), energy regenerating systems (creatine phosphate and creatine phosphokinase (eukaryotic systems)) (phosphoenol pyruvate and pyruvate kinase for bacterial systems), and other co-factors (Mg2+, K+, etc.). As previously mentioned, in vitro translation can be based on RNA or DNA starting material. Some translation systems can utilize an RNA template as starting material (e.g., reticulocyte lysates and wheat germ extracts). Some translation systems can utilize a DNA template as a starting material (e.g., E coli-based systems). In these systems transcription and translation are coupled and DNA is first transcribed into RNA, which is subsequently translated. Suitable standard and coupled cell-free translation systems are generally known in the art and are commercially available.

### Codon Optimization of Vector Polynucleotides

[0167] As described elsewhere herein, the polynucleotide encoding an n-mer motif of the present invention and/or other polynucleotides described herein can be codon optimized. In some embodiments, polynucleotides of the engineered AAV capsid system described herein can be codon optimized. In some embodiments, one or more polynucleotides contained in a vector (“vector polynucleotides”) described herein that are in addition to an optionally codon optimized polynucleotide encoding an n-mer motif, including but not limited to, embodiments of the engineered AAV capsid system described herein, can be codon optimized. In general, codon optimization refers to a process of modifying a nucleic acid sequence for enhanced expression in the host cells of interest by replacing at least one codon (e.g., about or more than about 1, 2, 3, 4, 5, 10, 15, 20, 25, 50, or more codons) of the native sequence with codons that are more frequently or most frequently used in the genes of that host cell while maintaining the native amino acid sequence. Various species exhibit particular bias for certain codons of a particular amino acid. Codon bias (differences in codon usage between organisms) often correlates with the efficiency of translation of messenger RNA (mRNA), which is in turn believed to be dependent on, among other things, the properties of the codons being translated and the availability of particular transfer RNA (tRNA) molecules. The predominance of selected tRNAs in a cell is generally a reflection of the codons used most frequently in peptide synthesis. Accordingly, genes can be tailored for optimal gene expression in a given organism based on codon optimization. Codon usage tables are readily available, for example, at the “Codon Usage Database” available at kazusa.orjp/codon/and these tables can be adapted in a number of ways. See Nakamura, Y., et al. “Codon usage tabulated from the international DNA sequence databases: status for the year 2000” Nucl. Acids Res. 28:292 (2000). Computer algorithms for codon optimizing a particular sequence for expression in a particular host cell are also available, such as Gene Forge (Aptagen; Jacobus, PA), are also available. In some embodiments, one or more codons (e.g., 1, 2, 3, 4, 5, 10, 15, 20, 25, 50, or more, or all codons) in a sequence encoding a DNA/RNA-targeting Cas protein corresponds to the most frequently used codon for a particular amino acid. As to codon usage in yeast, reference is made to the online Yeast Genome database available at yeastgenome.org/community/codon_usage.shtml, or Codon selection in yeast, Bennetzen and Hall, J Biol Chem. 1982 Mar. 25; 257(6):3026-31. As to codon usage in plants including algae, reference is made to Codon usage in higher plants, green algae, and cyanobacteria, Campbell and Gown, Plant Physiol. 1990 January; 92(1): 1-11.; as well as Codon usage in plant genes, Murray et al, Nucleic Acids Res. 1989 Jan. 25; 17(2):477-98; or Selection on the codon bias of chloroplast and cyanelle genes in different plant and algal lineages, Morton B R, J Mol Evol. 1998 April; 46(4):449-59.

[0168] The vector polynucleotide can be codon optimized for expression in a specific cell-type, tissue type, organ type, and/or subject type. In some embodiments, a codon optimized sequence is a sequence optimized for expression in a eukaryote, e.g., humans (i.e., being optimized for expression in a human or human cell), or for another eukaryote, such as another animal (e.g., a mammal or avian) as is described elsewhere herein. Such codon optimized sequences are within the ambit of the ordinary skilled artisan in view of the description herein. In some embodiments, the polynucleotide is codon optimized for a specific cell type. Such cell types can include, but are not limited to, epithelial cells (including skin cells, cells lining the gastrointestinal tract, cells lining other hollow organs), nerve cells (nerves, brain cells, spinal column cells, nerve support cells (e.g., astrocytes, glial cells, Schwann cells etc.), muscle cells (e.g., cardiac muscle, smooth muscle cells, and skeletal muscle cells), connective tissue cells (fat and other soft tissue padding cells, bone cells, tendon cells, cartilage cells), blood cells, stromal cells (e.g., bone marrow stroma cells), stem cells and other progenitor cells, immune system cells, germ cells, and combinations thereof. Such codon optimized sequences are within the ambit of the ordinary skilled artisan in view of the description herein. In some embodiments, the polynucleotide is codon optimized for a specific tissue type. Such tissue types can include, but are not limited to, muscle tissue, connective tissue, nervous tissue, and epithelial tissue. Such codon optimized sequences are within the ambit of the ordinary skilled artisan in view of the description herein. In some embodiments, the polynucleotide is codon optimized for a specific organ. Such organs include, but are not limited to, muscles, skin, intestines, liver, spleen, brain, lungs, stomach, heart, kidneys, gallbladder, pancreas, bladder, thyroid, bone, blood vessels, blood, and combinations thereof. Such codon optimized sequences are within the ambit of the ordinary skilled artisan in view of the description herein.

[0169] In some embodiments, a vector polynucleotide is codon optimized for expression in particular cells, such as prokaryotic or eukaryotic cells. The eukaryotic cells may be those of or derived from a particular organism, such as a plant or a mammal, including but not limited to human, or non-human eukaryote or animal or mammal as discussed herein, e.g., mouse, rat, rabbit, dog, livestock, or non-human mammal or primate.

### Non-Viral Vectors and Carriers

[0170] In some embodiments, the vector is a non-viral vector or carrier. In some embodiments, non-viral vectors can have the advantage(s) of reduced toxicity and/or immunogenicity and/or increased bio-safety as compared to viral vectors The terms of art “Non-viral vectors and carriers” and as used herein in this context refers to molecules and/or compositions that are not based on one or more component of a virus or virus genome (excluding any nucleotide to be delivered and/or expressed by the non-viral vector) that can be capable of attaching to, incorporating, coupling, and/or otherwise interacting with an engineered capsid polynucleotide (e.g., an engineered AAV capsid polynucleotide) or other composition of the present invention described herein and can be capable of ferrying the polynucleotide to a cell and/or expressing the polynucleotide. It will be appreciated that this does not exclude the inclusion of a virus-based polynucleotide that is to be delivered. For example, if a gRNA to be delivered is directed against a virus component and it is inserted or otherwise coupled to an otherwise non-viral vector or carrier, this would not make said vector a “viral vector”. Non-viral vectors and carriers include naked polynucleotides, chemical-based carriers, polynucleotide (non-viral) based vectors, and particle-based carriers. It will be appreciated that the term “vector” as used in the context of non-viral vectors and carriers refers to polynucleotide vectors and “carriers” used in this context refers to a non-nucleic acid or polynucleotide molecule or composition that be attached to or otherwise interact with a polynucleotide to be delivered, such as an engineered or variant AAV capsid polynucleotide of the present invention.

### Naked Polynucleotides

[0171] In some embodiments one or more engineered AAV capsid polynucleotides or other polynucleotides of the present invention described elsewhere herein can be included in a naked polynucleotide. The term of art “naked polynucleotide” as used herein refers to polynucleotides that are not associated with another molecule (e.g., proteins, lipids, and/or other molecules) that can often help protect it from environmental factors and/or degradation. As used herein, associated with includes, but is not limited to, linked to, adhered to, adsorbed to, enclosed in, enclosed in or within, mixed with, and the like. Naked polynucleotides that include one or more of the engineered AAV capsid polynucleotides or other polynucleotides of the present invention described herein can be delivered directly to a host cell and optionally expressed therein. The naked polynucleotides can have any suitable two- and three-dimensional configurations. By way of non-limiting examples, naked polynucleotides can be single-stranded molecules, double stranded molecules, circular molecules (e.g., plasmids and artificial chromosomes), molecules that contain portions that are single stranded and portions that are double stranded (e.g., ribozymes), and the like. In some embodiments, the naked polynucleotide contains only the engineered AAV capsid polynucleotide(s) or other polynucleotides of the present invention. In some embodiments, the naked polynucleotide can contain other nucleic acids and/or polynucleotides in addition to the engineered or variant AAV capsid polynucleotide(s) or other polynucleotides of the present invention described elsewhere herein. The naked polynucleotides can include one or more elements of a transposon system. Transposons and system thereof are described in greater detail elsewhere herein.

### Non-Viral Polynucleotide Vectors

[0172] In some embodiments, one or more of the engineered AAV capsid polynucleotides or other polynucleotides of the present invention can be included in a non-viral polynucleotide vector. Suitable non-viral polynucleotide vectors include, but are not limited to, transposon vectors and vector systems, plasmids, bacterial artificial chromosomes, yeast artificial chromosomes, AR(antibiotic resistance)-free plasmids and miniplasmids, circular covalently closed vectors (e.g., minicircles, minivectors, miniknots,), linear covalently closed vectors (“dumbbell shaped”), MIDGE (minimalistic immunologically defined gene expression) vectors, MiLV (micro-linear vector) vectors, Ministrings, mini-intronic plasmids, PSK systems (post-segregationally killing systems), ORT (operator repressor titration) plasmids, and the like. See e.g., Hardee et al. 2017. Genes. 8(2):65.

[0173] In some embodiments, the non-viral polynucleotide vector can have a conditional origin of replication. In some embodiments, the non-viral polynucleotide vector can be an ORT plasmid. In some embodiments, the non-viral polynucleotide vector can have a minimalistic immunologically defined gene expression. In some embodiments, the non-viral polynucleotide vector can have one or more post-segregationally killing system genes. In some embodiments, the non-viral polynucleotide vector is AR-free. In some embodiments, the non-viral polynucleotide vector is a minivector. In some embodiments, the non-viral polynucleotide vector includes a nuclear localization signal. In some embodiments, the non-viral polynucleotide vector can include one or more CpG motifs. In some embodiments, the non-viral polynucleotide vectors can include one or more scaffold/matrix attachment regions (S/MARs). See e.g., Mirkovitch et al. 1984. Cell. 39:223-232, Wong et al. 2015. Adv. Genet. 89:113-152, whose techniques and vectors can be adapted for use in the present invention. S/MARs are AT-rich sequences that play a role in the spatial organization of chromosomes through DNA loop base attachment to the nuclear matrix. S/MARs are often found close to regulatory elements such as promoters, enhancers, and origins of DNA replication. Inclusion of one or S/MARs can facilitate a once-per-cell-cycle replication to maintain the non-viral polynucleotide vector as an episome in daughter cells. In some embodiments, the S/MAR sequence is located downstream of an actively transcribed polynucleotide (e.g., one or more engineered AAV capsid polynucleotides or other polynucleotides or molecules of the present invention) included in the non-viral polynucleotide vector. In some embodiments, the S/MAR can be a S/MAR from the beta-interferon gene cluster. See e.g., Verghese et al. 2014. Nucleic Acid Res. 42:e53; Xu et al. 2016. Sci. China Life Sci. 59:1024-1033; Jin et al. 2016. 8:702-711; Koirala et al. 2014. Adv. Exp. Med. Biol. 801:703-709; and Nehlsen et al. 2006. Gene Ther. Mol. Biol. 10:233-244, whose techniques and vectors can be adapted for use in the present invention.

[0174] In some embodiments, the non-viral vector is a transposon vector or system thereof. As used herein, “transposon” (also referred to as transposable element) refers to a polynucleotide sequence that is capable of moving from one location in a genome to another. There are several classes of transposons. Transposons include retrotransposons and DNA transposons. Retrotransposons require the transcription of the polynucleotide that is moved (or transposed) in order to transpose the polynucleotide to a new genome or polynucleotide. DNA transposons are those that do not require reverse transcription of the polynucleotide that is moved (or transposed) in order to transpose the polynucleotide to a new genome or polynucleotide. In some embodiments, the non-viral polynucleotide vector can be a retrotransposon vector. In some embodiments, the retrotransposon vector includes long terminal repeats. In some embodiments, the retrotransposon vector does not include long terminal repeats. In some embodiments, the non-viral polynucleotide vector can be a DNA transposon vector. DNA transposon vectors can include a polynucleotide sequence encoding a transposase. In some embodiments, the transposon vector is configured as a non-autonomous transposon vector, meaning that the transposition does not occur spontaneously on its own. In some of these embodiments, the transposon vector lacks one or more polynucleotide sequences encoding proteins required for transposition. In some embodiments, the non-autonomous transposon vectors lack one or more Ac elements.

[0175] In some embodiments, a non-viral polynucleotide transposon vector system can include a first polynucleotide vector that contains the engineered AAV capsid polynucleotide(s) or other polynucleotides, or molecules of the present invention described herein flanked on the 5′ and 3′ ends by transposon terminal inverted repeats (TIRs) and a second polynucleotide vector that includes a polynucleotide capable of encoding a transposase coupled to a promoter to drive expression of the transposase. When both are expressed in the same cell the transposase can be expressed from the second vector and can transpose the material between the TIRs on the first vector (e.g., the engineered AAV capsid polynucleotide(s) or other polynucleotides or molecules of the present invention) and integrate it into one or more positions in the host cell's genome. In some embodiments the transposon vector or system thereof can be configured as a gene trap. In some embodiments, the TIRs can be configured to flank a strong splice acceptor site followed by a reporter and/or other gene (e.g., one or more of the engineered or variant AAV capsid polynucleotide(s) or other polynucleotides or molecules of the present invention) and a strong poly A tail. When transposition occurs while using this vector or system thereof, the transposon can insert into an intron of a gene and the inserted reporter or other gene can provoke a mis-splicing process and as a result it inactivates the trapped gene.

[0176] Any suitable transposon system can be used. Suitable transposon and systems thereof can include Sleeping Beauty transposon system (Tc1/mariner superfamily) (see e.g., Ivics et al. 1997. Cell. 91(4): 501-510), piggyBac (piggyBac superfamily) (see e.g., Li et al. 2013 110(25): E2279-E2287 and Yusa et al. 2011. PNAS. 108(4): 1531-1536), Tol2 (superfamily hAT), Frog Prince (Tc1/mariner superfamily) (see e.g., Miskey et al. 2003 Nucleic Acid Res. 31(23):6873-6881) and variants thereof.

### Chemical Carriers

[0177] In some embodiments, the engineered AAV capsid polynucleotide(s) or other polynucleotides or other molecules of the present invention described herein can be coupled to a chemical carrier. Chemical carriers that can be suitable for delivery of polynucleotides can be broadly classified into the following classes: (i) inorganic particles, (ii) lipid-based, (iii) polymer-based, and (iv) peptide based. They can be categorized as (1) those that can form condensed complexes with a polynucleotide (such as the engineered AAV capsid polynucleotide(s) of the present invention), (2) those capable of targeting specific cells, (3) those capable of increasing delivery of the polynucleotide or other molecules (such as the engineered AAV capsid polynucleotide(s)) of the present invention to the nucleus or cytosol of a host cell, (4) those capable of disintegrating from DNA/RNA in the cytosol of a host cell, and (5) those capable of sustained or controlled release. It will be appreciated that any one given chemical carrier can include features from multiple categories. The term “particle” as used herein, refers to any suitable sized particles for delivery of the compositions (including particles, polypeptides, polynucleotides, and other compositions described herein) of the present invention described herein. Suitable sizes include macro-, micro-, and nano-sized particles.

[0178] In some embodiments, the non-viral carrier can be an inorganic particle. In some embodiments, the inorganic particle, can be a nanoparticle. The inorganic particles can be configured and optimized by varying size, shape, and/or porosity. In some embodiments, the inorganic particles are optimized to escape from the reticulo endothelial system. In some embodiments, the inorganic particles can be optimized to protect an entrapped molecule from degradation. The suitable inorganic particles that can be used as non-viral carriers in this context can include, but are not limited to, calcium phosphate, silica, metals (e.g., gold, platinum, silver, palladium, rhodium, osmium, iridium, ruthenium, mercury, copper, rhenium, titanium, niobium, tantalum, and combinations thereof), magnetic compounds, particles, and materials, (e.g., supermagnetic iron oxide and magnetite), quantum dots, fullerenes (e.g., carbon nanoparticles, nanotubes, nanostrings, and the like), and combinations thereof. Other suitable inorganic non-viral carriers are discussed elsewhere herein.

[0179] In some embodiments, the non-viral carrier can be lipid-based. Suitable lipid-based carriers are also described in greater detail herein. In some embodiments, the lipid-based carrier includes a cationic lipid or an amphiphilic lipid that is capable of binding or otherwise interacting with a negative charge on the polynucleotide to be delivered (e.g., such as an engineered AAV capsid polynucleotide of the present invention). In some embodiments, chemical non-viral carrier systems can include a polynucleotide (such as the engineered AAV capsid polynucleotide(s) or other composition or molecule of the present invention) and a lipid (such as a cationic lipid). These are also referred to in the art as lipoplexes. Other embodiments of lipoplexes are described elsewhere herein. In some embodiments, the non-viral lipid-based carrier can be a lipid nano emulsion. Lipid nano emulsions can be formed by the dispersion of an immiscible liquid in another stabilized emulsifying agent and can have particles of about 200 nm that are composed of the lipid, water, and surfactant that can contain the polynucleotide to be delivered (e.g., the engineered AAV capsid polynucleotide(s) of the present invention). In some embodiments, the lipid-based non-viral carrier can be a solid lipid particle or nanoparticle.

[0180] In some embodiments, the non-viral carrier can be peptide-based. In some embodiments, the peptide-based non-viral carrier can include one or more cationic amino acids. In some embodiments, 35 to 40, 45, 50, 55, 60, 65, 70, 75, 80, 85, 90, 95, 99 or 100% of the amino acids are cationic. In some embodiments, peptide carriers can be used in conjunction with other types of carriers (e.g., polymer-based carriers and lipid-based carriers to functionalize these carriers). In some embodiments, the functionalization is targeting a host cell. Suitable polymers that can be included in the polymer-based non-viral carrier can include, but are not limited to, polyethylenimine (PEI), chitosan, poly (DL-lactide) (PLA), poly (DL-Lactide-co-glycoside) (PLGA), dendrimers (see e.g., US Pat. Pub. 2017/0079916 whose techniques and compositions can be adapted for use with the engineered AAV capsid polynucleotides of the present invention), polymethacrylate, and combinations thereof.

[0181] In some embodiments, the non-viral carrier can be configured to release an engineered delivery system polynucleotide that is associated with or attached to the non-viral carrier in response to an external stimulus, such as pH, temperature, osmolarity, concentration of a specific molecule or composition (e.g., calcium, NaCl, and the like), pressure and the like. In some embodiments, the non-viral carrier can be a particle that is configured includes one or more of the engineered or variant AAV capsid polynucleotides or other compositions of the present invention describe herein and an environmental triggering agent response element, and optionally a triggering agent. In some embodiments, the particle can include a polymer that can be selected from the group of polymethacrylates and polyacrylates. In some embodiments, the non-viral particle can include one or more embodiments of the compositions microparticles described in US Pat. Pubs. 2015/0232883 and 2005/0123596, whose techniques and compositions can be adapted for use in the present invention.

[0182] In some embodiments, the non-viral carrier can be a polymer-based carrier. In some embodiments, the polymer is cationic or is predominantly cationic such that it can interact in a charge-dependent manner with the negatively charged polynucleotide to be delivered (such as the engineered AAV capsid polynucleotide(s) of the present invention). Polymer-based systems are described in greater detail elsewhere herein.

### Viral Vectors

[0183] In some embodiments, the vector is a viral vector. The term of art “viral vector” and as used herein in this context refers to polynucleotide based vectors that contain one or more elements from or based upon one or more elements of a virus that can be capable of expressing and packaging a polynucleotide, such as an engineered AAV capsid polynucleotide, cargo, or other composition or molecule of the present invention, into a virus particle and producing said virus particle when used alone or with one or more other viral vectors (such as in a viral vector system). Viral vectors and systems thereof can be used for producing viral particles for delivery of and/or expression and/or generation of one or more compositions of the present invention described herein (including, but not limited to, any viral particle and associated cargo). The viral vector can be part of a viral vector system involving multiple vectors. In some embodiments, systems incorporating multiple viral vectors can increase the safety of these systems. Suitable viral vectors can include adenoviral-based vectors, adeno associated vectors, helper-dependent adenoviral (HdAd) vectors, hybrid adenoviral vectors, and the like. Other embodiments of viral vectors and viral particles produce therefrom are described elsewhere herein. In some embodiments, the viral vectors are configured to produce replication incompetent viral particles for improved safety of these systems.

Adenoviral Vectors. Helper-Dependent Adenoviral Vectors, and Hybrid Adenoviral Vectors

[0184] In some embodiments, the vector can be an adenoviral vector. In some embodiments, the adenoviral vector can include elements such that the virus particle produced using the vector or system thereof can be serotype 2, 5, or 9. In some embodiments, the polynucleotide to be delivered via the adenoviral particle can be up to about 8 kb. Thus, in some embodiments, an adenoviral vector can include a DNA polynucleotide to be delivered that can range in size from about 0.001 kb to about 8 kb. Adenoviral vectors have been used successfully in several contexts (see e.g., Teramato et al. 2000. Lancet. 355:1911-1912; Lai et al. 2002. DNA Cell. Biol. 21:895-913; Flotte et al., 1996. Hum. Gene. Ther. 7:1145-1159; and Kay et al. 2000. Nat. Genet. 24:257-261. The engineered AAV capsids can be included in an adenoviral vector to produce adenoviral particles containing said engineered AAV capsids.

[0185] In some embodiments the vector can be a helper-dependent adenoviral vector or system thereof. These are also referred to in the field as “gutless” or “gutted” vectors and are a modified generation of adenoviral vectors (see e.g., Thrasher et al. 2006. Nature. 443:E5-7). In some embodiments of the helper-dependent adenoviral vector system, one vector (the helper) can contain all the viral genes required for replication but contains a conditional gene defect in the packaging domain. The second vector of the system can contain only the ends of the viral genome, one or more engineered AAV capsid polynucleotides, and the native packaging recognition signal, which can allow selective packaged release from the cells (see e.g., Cideciyan et al. 2009. N Engl J Med. 361:725-727). Helper-dependent Adenoviral vector systems have been successful for gene delivery in several contexts (see e.g., Simonelli et al. 2010. J Am Soc Gene Ther. 18:643-650; Cideciyan et al. 2009. N Engl J Med. 361:725-727; Crane et al. 2012. Gene Ther. 19(4):443-452; Alba et al. 2005. Gene Ther. 12:18-S27; Croyle et al. 2005. Gene Ther. 12:579-587; Amalfitano et al. 1998. J. Virol. 72:926-933; and Morral et al. 1999. PNAS. 96:12816-12821). The techniques and vectors described in these publications can be adapted for inclusion and delivery of the engineered AAV capsid polynucleotides described herein. In some embodiments, the polynucleotide to be delivered via the viral particle produced from a helper-dependent adenoviral vector or system thereof can be up to about 38 kb. Thus, in some embodiments, an adenoviral vector can include a DNA polynucleotide to be delivered that can range in size from about 0.001 kb to about 37 kb (see e.g., Rosewell et al. 2011. J. Genet. Syndr. Gene Ther. Suppl. 5:001).

[0186] In some embodiments, the vector is a hybrid-adenoviral vector or system thereof. Hybrid adenoviral vectors are composed of the high transduction efficiency of a gene-deleted adenoviral vector and the long-term genome-integrating potential of adeno-associated, retroviruses, lentivirus, and transposon based-gene transfer. In some embodiments, such hybrid vector systems can result in stable transduction and limited integration site. See e.g., Balague et al. 2000. Blood. 95:820-828; Morral et al. 1998. Hum. Gene Ther. 9:2709-2716; Kubo and Mitani. 2003. J. Virol. 77(5): 2964-2971; Zhang et al. 2013. PloS One. 8(10) e76771; and Cooney et al. 2015. Mol. Ther. 23(4):667-674), whose techniques and vectors described therein can be modified and adapted for use in the engineered AAV capsid system of the present invention. In some embodiments, a hybrid-adenoviral vector can include one or more features of a retrovirus and/or an adeno-associated virus. In some embodiments the hybrid-adenoviral vector can include one or more features of a spuma retrovirus or foamy virus (FV). See e.g., Ehrhardt et al. 2007. Mol. Ther. 15:146-156 and Liu et al. 2007. Mol. Ther. 15:1834-1841, whose techniques and vectors described therein can be modified and adapted for use in the engineered AAV capsid system of the present invention. Advantages of using one or more features from the FVs in the hybrid-adenoviral vector or system thereof can include the ability of the viral particles produced therefrom to infect a broad range of cells, a large packaging capacity as compared to other retroviruses, and the ability to persist in quiescent (non-dividing) cells. See also e.g., Ehrhardt et al. 2007. Mol. Ther. 156:146-156 and Shuji et al. 2011. Mol. Ther. 19:76-82, whose techniques and vectors described therein can be modified and adapted for use in the engineered AAV capsid system of the present invention.

### Adeno Associated Vectors

[0187] In one embodiment, the engineered vector or system thereof can be an adeno-associated vector (AAV). See, e.g., West et al., Virology 160:38-47 (1987); U.S. Pat. No. 4,797,368; WO 93/24641; Kotin, Human Gene Therapy 5:793-801 (1994); and Muzyczka, J. Clin. Invest. 94:1351 (1994). Although similar to adenoviral vectors in some of their features, AAVs have some deficiency in their replication and/or pathogenicity and thus can be safer that adenoviral vectors. In some embodiments the AAV can integrate into a specific site on chromosome 19 of a human cell with no observable side effects. In some embodiments, the capacity of the AAV vector, system thereof, and/or AAV particles can be up to about 4.7 kb. The AAV vector or system thereof can include one or more engineered capsid polynucleotides described herein.

[0188] The AAV vector or system thereof can include one or more regulatory molecules. In some embodiments the regulatory molecules can be promoters, enhancers, repressors and the like, which are described in greater detail elsewhere herein. In some embodiments, the AAV vector or system thereof can include one or more polynucleotides that can encode one or more regulatory proteins. In some embodiments, the one or more regulatory proteins can be selected from Rep78, Rep68, Rep52, Rep40, variants thereof, and combinations thereof. In some embodiments, the promoter can be a tissue specific promoter as previously discussed. In some embodiments, the tissue specific promoter can drive expression of an engineered capsid AAV capsid polynucleotide described herein.

[0189] The AAV vector or system thereof can include one or more polynucleotides that can encode one or more capsid proteins, such as the engineered AAV capsid proteins described elsewhere herein. The engineered capsid proteins can be capable of assembling into a protein shell (an engineered capsid) of the AAV virus particle. The engineered capsid can have a cell-, tissue,- and/or organ-specific tropism.

[0190] In some embodiments, the AAV vector or system thereof can include one or more adenovirus helper factors or polynucleotides that can encode one or more adenovirus helper factors. Such adenovirus helper factors can include, but are not limited. E1A, E1B, E2A, E40RF6, and VA RNAs. In some embodiments, a producing host cell line expresses one or more of the adenovirus helper factors.

[0191] The AAV vector or system thereof can be configured to produce AAV particles having a specific serotype. In some embodiments, the serotype can be AAV-1, AAV-2, AAV-3, AAV-4, AAV-5, AAV-6, AAV-8, AAV-9 or any combinations thereof. In some embodiments, the AAV can be AAV1, AAV-2, AAV-5, AAV-9 or any combination thereof. One can select the AAV of the AAV with regard to the cells to be targeted; e.g., one can select AAV serotypes 1, 2, 5, 9 or a hybrid capsid AAV-1, AAV-2, AAV-5, AAV-9 or any combination thereof for targeting brain and/or neuronal cells; and one can select AAV-4 for targeting cardiac tissue; and one can select AAV-8 for delivery to the liver. Thus, in some embodiments, an AAV vector or system thereof capable of producing AAV particles capable of targeting the brain and/or neuronal cells can be configured to generate AAV particles having serotypes 1, 2, 5 or a hybrid capsid AAV-1, AAV-2, AAV-5 or any combination thereof. In some embodiments, an AAV vector or system thereof capable of producing AAV particles capable of targeting cardiac tissue can be configured to generate an AAV particle having an AAV-4 serotype. In some embodiments, an AAV vector or system thereof capable of producing AAV particles capable of targeting the liver can be configured to generate an AAV having an AAV-8 serotype. See also Srivastava. 2017. Curr. Opin. Virol. 21:75-80.

[0192] It will be appreciated that while the different serotypes can provide some level of cell, tissue, and/or organ specificity, each serotype still is multi-tropic and thus can result in tissue-toxicity if using that serotype to target a tissue that the serotype is less efficient in transducing. Thus, in addition to achieving some tissue targeting capacity via selecting an AAV of a particular serotype, it will be appreciated that the tropism of the AAV serotype can be modified by an engineered AAV capsid described herein. As described elsewhere herein, variants of wild-type AAV of any serotype can be generated via a method described herein and determined to have a particular cell-specific tropism, which can be the same or different as that of the reference wild-type AAV serotype. In some embodiments, the cell, tissue, and/or specificity of the wild-type serotype can be enhanced (e.g., made more selective or specific for a particular cell type that the serotype is already biased towards). For example, wild-type AAV-9 is biased towards muscle and brain in humans (see e.g., Srivastava. 2017. Curr. Opin. Virol. 21:75-80). By including an engineered AAV capsid and/or capsid protein variant of wild-type AAV-9 as described herein, the bias for e.g., brain can be reduced or eliminated and/or the muscle septicity increased such that the brain specificity appears reduced in comparison, thus enhancing the specificity for the muscle as compared to the wild-type AAV-9. As previously mentioned, inclusion of an engineered capsid and/or capsid protein variant of a wild-type AAV serotype can have a different tropism than the wild-type reference AAV serotype. For example, an engineered AAV capsid and/or capsid protein variant of AAV-9 can have specificity for a tissue other than muscle or brain in humans.

[0193] In some embodiments, the AAV vector is a hybrid AAV vector or system thereof. Hybrid AAVs are AAVs that include genomes with elements from one serotype that are packaged into a capsid derived from at least one different serotype. For example, if it is the rAAV2/5 that is to be produced, and if the production method is based on the helper-free, transient transfection method discussed above, the 1 st plasmid and the 3rd plasmid (the adeno helper plasmid) will be the same as discussed for rAAV2 production. However, the 2nd plasmid, the pRepCap will be different. In this plasmid, called pRep2/Cap5, the Rep gene is still derived from AAV2, while the Cap gene is derived from AAV5. The production scheme is the same as the above-mentioned approach for AAV2 production. The resulting rAAV is called rAAV2/5, in which the genome is based on recombinant AAV2, while the capsid is based on AAV5. It is assumed the cell or tissue-tropism displayed by this AAV2/5 hybrid virus should be the same as that of AAV5. It will be appreciated that wild-type hybrid AAV particles suffer the same specificity issues as with the non-hybrid wild-type serotypes previously discussed.

[0194] Advantages achieved by the wild-type based hybrid AAV systems can be combined with the increased and customizable cell-specificity that can be achieved with the engineered AAV capsids by generating a hybrid AAV that can include an engineered AAV capsid described elsewhere herein. It will be appreciated that hybrid AAVs can contain an engineered AAV capsid containing a genome with elements from a different serotype than the reference wild-type serotype that the engineered AAV capsid is a variant of. For example, a hybrid AAV can be produced that includes an engineered AAV capsid that is a variant of an AAV-9 serotype that is used to package a genome that contains components (e.g., rep elements) from an AAV-2 serotype. As with wild-type based hybrid AAVs previously discussed, the tropism of the resulting AAV particle will be that of the engineered AAV capsid.

[0195] A tabulation of certain wild-type AAV serotypes as to these cells can be found in Grimm, D. et al, J. Virol. 82: 5887-5911 (2008) reproduced below as Table 1. Further tropism details can be found in Srivastava. 2017. Curr. Opin. Virol. 21:75-80 as previously discussed.

TABLE 1

| Cell Line | AAV-1 | AAV-2 | AAV-3 | AAV-4 | AAV-5 | AAV-6 | AAV-8 | AAV-9 |
|---|---|---|---|---|---|---|---|---|
| Huh-7 | 13 | 100 | 2.5 | 0.0 | 0.1 | 10 | 0.7 | 0.0 |
| HEK293 | 25 | 100 | 2.5 | 0.1 | 0.1 | 5 | 0.7 | 0.1 |
| HeLa | 3 | 100 | 2.0 | 0.1 | 6.7 | 1 | 0.2 | 0.1 |
| HepG2 | 3 | 100 | 16.7 | 0.3 | 1.7 | 5 | 0.3 | ND |
| Hep1A | 20 | 100 | 0.2 | 1.0 | 0.1 | 1 | 0.2 | 0.0 |
| 911 | 17 | 100 | 11 | 0.2 | 0.1 | 17 | 0.1 | ND |
| CHO | 100 | 100 | 14 | 1.4 | 333 | 50 | 10 | 1.0 |
| COS | 33 | 100 | 33 | 3.3 | 5.0 | 14 | 2.0 | 0.5 |
| MeWo | 10 | 100 | 20 | 0.3 | 6.7 | 10 | 1.0 | 0.2 |
| NIH3T3 | 10 | 100 | 2.9 | 2.9 | 0.3 | 10 | 0.3 | ND |
| A549 | 14 | 100 | 20 | ND | 0.5 | 10 | 0.5 | 0.1 |
| HT1180 | 20 | 100 | 10 | 0.1 | 0.3 | 33 | 0.5 | 0.1 |
| Monocytes | 1111 | 100 | ND | ND | 125 | 1429 | ND | ND |
| Immature DC | 2500 | 100 | ND | ND | 222 | 2857 | ND | ND |
| Mature DC | 2222 | 100 | ND | ND | 333 | 3333 | ND | ND |

[0196] In some embodiments, the AAV vector or system thereof is AAV rh.74 or AAV rh.10.

[0197] In some embodiments, the AAV vector or system thereof is configured as a “gutless” vector, similar to that described in connection with a retroviral vector. In some embodiments, the “gutless” AAV vector or system thereof can have the cis-acting viral DNA elements involved in genome amplification and packaging in linkage with the heterologous sequences of interest (e.g., the engineered AAV capsid polynucleotide(s)).

### Vector Construction

[0198] The vectors described herein can be constructed using any suitable process or technique. In some embodiments, one or more suitable recombination and/or cloning methods or techniques can be used to form the vector(s) described herein. Suitable recombination and/or cloning techniques and/or methods can include, but are not limited to, those described in U.S. Application publication No. US 2004/0171156 A1. Other suitable methods and techniques are described elsewhere herein.

[0199] Construction of recombinant AAV vectors is described in a number of publications, including U.S. Pat. No. 5,173,414; Tratschin et al., Mol. Cell. Biol. 5:3251-3260 (1985); Tratschin, et al., Mol. Cell. Biol. 4:2072-2081 (1984); Hermonat & Muzyczka, PNAS 81:6466-6470 (1984); and Samulski et al., J. Virol. 63:03822-3828 (1989). Any of the techniques and/or methods can be used and/or adapted for constructing an AAV or other vector described herein. AAV vectors are discussed elsewhere herein.

[0200] In some embodiments, the vector can have one or more insertion sites, such as a restriction endonuclease recognition sequence (also referred to as a “cloning site”). In some embodiments, one or more insertion sites (e.g., about or more than about 1, 2, 3, 4, 5, 6, 7, 8, 9, 10, or more insertion sites) are located upstream and/or downstream of one or more sequence elements of one or more vectors.

[0201] Delivery vehicles, vectors, particles, nanoparticles, formulations and components thereof for expression of one or more elements of an engineered AAV capsid system described herein are as used in the foregoing documents, such as International Patent Application Publication WO 2014/093622 (PCT/US2013/074667) and are discussed in greater detail herein.

Virus Particle Production from Viral Vectors

### AAV Particle Production

[0202] There are two main strategies for producing AAV particles from AAV vectors and systems thereof, such as those described herein, which depend on how the adenovirus helper factors are provided (helper v. helper free). In some embodiments, a method of producing AAV particles from AAV vectors and systems thereof can include adenovirus infection into cell lines that stably harbor AAV replication and capsid encoding polynucleotides along with AAV vector containing the polynucleotide to be packaged and delivered by the resulting AAV particle (e.g., the engineered AAV capsid polynucleotide(s)). In some embodiments, a method of producing AAV particles from AAV vectors and systems thereof can be a “helper free” method, which includes co-transfection of an appropriate producing cell line with three vectors (e.g., plasmid vectors): (1) an AAV vector that contains a polynucleotide of interest (e.g., the engineered AAV capsid polynucleotide(s)) between 2 ITRs; (2) a vector that carries the AAV Rep-Cap encoding polynucleotides; and (3) helper polynucleotides. One of skill in the art will appreciate various methods and variations thereof that are both helper and -helper free and as well as the different advantages of each system.

[0203] The engineered AAV vectors and systems thereof described herein can be produced by any of these methods.

### Vector and Virus Particle Delivery

[0204] A vector (including non-viral carriers) described herein can be introduced into host cells to thereby produce transcripts, proteins, or peptides, including fusion proteins or peptides encoded by nucleic acids as described herein (e.g., engineered AAV capsid system transcripts, proteins, enzymes, mutant forms thereof, fusion proteins thereof, etc.), and virus particles (such as from viral vectors and systems thereof).

[0205] One or more engineered AAV capsid polynucleotides can be delivered using adeno associated virus (AAV), adenovirus or other plasmid or viral vector types as previously described, in particular, using formulations and doses from, for example, U.S. Pat. No. 8,454,972 (formulations, doses for adenovirus), U.S. Pat. No. 8,404,658 (formulations, doses for AAV) and U.S. Pat. No. 5,846,946 (formulations, doses for DNA plasmids) and from clinical trials and publications regarding the clinical trials involving lentivirus, AAV and adenovirus. For examples, for AAV, the route of administration, formulation and dose can be as in U.S. Pat. No. 8,454,972 and as in clinical trials involving AAV. For Adenovirus, the route of administration, formulation and dose can be as in U.S. Pat. No. 8,404,658 and as in clinical trials involving adenovirus.

[0206] For plasmid delivery, the route of administration, formulation and dose can be as in U.S. Pat. No. 5,846,946 and as in clinical studies involving plasmids. In some embodiments, doses can be based on or extrapolated to an average 70 kg individual (e.g., a male adult human), and can be adjusted for patients, subjects, mammals of different weight and species. Frequency of administration is within the ambit of the medical or veterinary practitioner (e.g., physician, veterinarian), depending on usual factors including the age, sex, general health, other conditions of the patient or subject and the particular condition or symptoms being addressed. The viral vectors can be injected into or otherwise delivered to the tissue or cell of interest.

[0207] In terms of in vivo delivery, AAV is advantageous over other viral vectors for a couple of reasons such as low toxicity (this may be due to the purification method not requiring ultra-centrifugation of cell particles that can activate the immune response) and a low probability of causing insertional mutagenesis because it doesn't integrate into the host genome.

[0208] The vector(s) and virus particles described herein can be delivered into a host cell in vitro, in vivo, and or ex vivo. Delivery can occur by any suitable method including, but not limited to, physical methods, chemical methods, and biological methods. Physical delivery methods are those methods that employ physical force to counteract the membrane barrier of the cells to facilitate intracellular delivery of the vector. Suitable physical methods include, but are not limited to, needles (e.g., injections), ballistic polynucleotides (e.g., particle bombardment, micro projectile gene transfer, and gene gun), electroporation, sonoporation, photoporation, magnetofection, hydroporation, and mechanical massage. Chemical methods are those methods that employ a chemical to elicit a change in the cells membrane permeability or other characteristic(s) to facilitate entry of the vector into the cell. For example, the environmental pH can be altered which can elicit a change in the permeability of the cell membrane. Biological methods are those that rely and capitalize on the host cell's biological processes or biological characteristics to facilitate transport of the vector (with or without a carrier) into a cell. For example, the vector and/or its carrier can stimulate an endocytosis or similar process in the cell to facilitate uptake of the vector into the cell.

[0209] Delivery of engineered AAV capsid system components (e.g., polynucleotides encoding engineered AAV capsid and/or capsid proteins) to cells via particles. The term “particle” as used herein, refers to any suitable sized particles for delivery of the engineered AAV capsid system components described herein. Suitable sizes include macro-, micro-, and nano-sized particles. In some embodiments, any of the engineered AAV capsid system components (e.g., polypeptides, polynucleotides, vectors and combinations thereof described herein) can be attached to, coupled to, integrated with, otherwise associated with one or more particles or component thereof as described herein. The particles described herein can then be administered to a cell or organism by an appropriate route and/or technique. In some embodiments, particle delivery can be selected and be advantageous for delivery of the polynucleotide or vector components. It will be appreciated that in embodiments, particle delivery can also be advantageous for other engineered capsid system molecules and formulations described elsewhere herein.

### Engineered or Variant Virus Particles Including an Engineered or Variant Viral (e.g., AAV) Capsid

[0210] Also described herein are engineered or variant virus particles (also referred to here and elsewhere herein as “engineered viral particles” or “variant viral particles” that can contain an engineered or variant viral capsid (e.g., AAV capsid, referred to as “engineered AAV particles” or “variant AAV particles”) as described in detail elsewhere herein. It will be appreciated that the engineered AAV particles can be adenovirus-based particles, helper adenovirus-based particles, AAV-based particles, or hybrid adenovirus-based particles that contain at least one engineered AAV capsid proteins as previously described. An engineered AAV capsid is one that that contains one or more engineered AAV capsid proteins as are described elsewhere herein. In some embodiments, the engineered AAV particles can include 1-60 engineered AAV capsid proteins described herein. In some embodiments, the engineered AAV particles can contain 1, 2, 3, 4, 5, 6, 7, 8, 9, 10, 11, 12, 13, 14, 15, 16, 17, 18, 19, 20, 21, 22, 23, 24, 25, 26, 27, 28, 29, 30, 31, 32, 33, 34, 35, 36, 37, 38, 39, 40, 41, 42, 43, 44, 45, 46, 47, 48, 49, 50, 51, 52, 53, 54, 55, 56, 57, 58, 59, or 60 engineered capsid proteins. In some embodiments, the engineered AAV particles can contain 0-59 wild-type AAV capsid proteins. In some embodiments, the engineered AAV particles can contain 0, 1, 2, 3, 4, 5, 6, 7, 8, 9, 10, 11, 12, 13, 14, 15, 16, 17, 18, 19, 20, 21, 22, 23, 24, 25, 26, 27, 28, 29, 30, 31, 32, 33, 34, 35, 36, 37, 38, 39, 40, 41, 42, 43, 44, 45, 46, 47, 48, 49, 50, 51, 52, 53, 54, 55, 56, 57, 58, or 59 wild-type AAV capsid proteins. The engineered AAV particles can thus include one or more n-mer motifs as is previously described.

[0211] The engineered AAV particle can include one or more cargo polynucleotides. Cargo polynucleotides are discussed in greater detail elsewhere herein. Methods of making the engineered AAV particles from viral and non-viral vectors are described elsewhere herein. Formulations containing the engineered virus particles are described elsewhere herein.

### Cargo Polynucleotides

[0212] Cargos are also described elsewhere herein. In some embodiments, the cargo is a cargo polynucleotide that can be packaged into an engineered or variant viral particle and subsequently delivered to a cell. In some embodiments, delivery is hematopoietic cell specific. The engineered or variant viral (e.g., AAV) capsid polynucleotides, other viral (e.g., AAV) polynucleotide(s), and/or vector polynucleotides can contain one or more cargo polynucleotides. In some embodiments, the one or more cargo polynucleotides can be operably linked to the engineered viral (e.g., AAV) capsid polynucleotide(s) and can be part of the engineered viral (e.g., AAV) genome of the viral (e.g., AAV) system of the present invention. The cargo polynucleotides can be packaged into an engineered viral (e.g., AAV) particle, which can be delivered to, e.g., a cell. In some embodiments, the cargo polynucleotide can be capable of modifying a polynucleotide (e.g., gene or transcript) of a cell to which it is delivered. As used herein, “gene” can refer to a hereditary unit corresponding to a sequence of DNA that occupies a specific location on a chromosome and that contains the genetic instruction for a characteristic(s) or trait(s) in an organism. The term gene can refer to translated and/or untranslated regions of a genome. “Gene” can refer to the specific sequence of DNA that is transcribed into an RNA transcript that can be translated into a polypeptide or be a catalytic RNA molecule, including but not limited to, tRNA, siRNA, piRNA, miRNA, long-non-coding RNA and shRNA. Polynucleotide, gene, transcript, etc. modification includes all genetic engineering techniques including, but not limited to, gene editing as well as conventional recombinational gene modification techniques (e.g., whole or partial gene insertion, deletion, and mutagenesis (e.g., insertional and deletional mutagenesis) techniques.

[0213] In some embodiments, the cargo molecule is a polynucleotide that is or can encode a vaccine. In some embodiments, the vaccine can stimulate an immune response against a cancer.

### Gene Modification Cargo Polynucleotides

[0214] In some embodiments, the cargo molecule can be a polynucleotide or polypeptide that can alone or when delivered as part of a system, whether or not delivered with other components of the system, operate to modify the genome, epigenome, and/or transcriptome of a cell to which it is delivered. Such systems include, but are not limited to, CRISPR-Cas systems. Other gene modification systems, e.g., TALENs, Zinc Finger nucleases, Cre-Lox, morpholinos, etc. are other non-limiting examples of gene modification systems whose one or more components can be delivered by the engineered viral (e.g., AAV) particles described herein.

[0215] In some embodiments, the cargo molecule is a gene editing system or component thereof. In some embodiments, the cargo molecule is a CRISPR-Cas system molecule or a component thereof. In some embodiments, the cargo molecule is a polynucleotide that encodes one or more components of a gene modification system (such as a CRISPR-Cas system). In some embodiments the cargo molecule is a gRNA.

[0216] In some embodiments, the cargo molecule can be a polynucleotide or polypeptide that can alone or when delivered as part of a system, whether or not delivered with other components of the system, operate to modify the genome, epigenome, and/or transcriptome of a cell to which it is delivered, is such that it treats or prevents a disease, a disorder, or a symptom thereof of a blood disease or disorder. In some embodiments, the cargo molecule (e.g., beta-globin, a secreted therapeutic protein, Cas9 gRNA, etc.), whether or not delivered with other components of the system, operate to modify the genome, epigenome, and/or transcriptome of a cell to which it is delivered, is such that it treats or prevents, blood diseases or disorders including HIV/AIDs, blood cancers (e.g., leukemia, lymphoma, myeloma, monoclonal gammopathy of undetermined significance (MGUS)), bleeding disorders (e.g., acquired platelet function defects, congenital platelet function defects, disseminated intravascular coagulation (DIC), prothrombin deficiency, factor V deficiency, factor VII deficiency, factor X deficiency, factor XI deficiency (hemophilia C), Glanzmann disease, hemophilia A, hemophilia B, idiopathic thrombocytopenic purpura (ITP), von Willebrand disease (types I, II, and/or III)), hemoglobinopathies (e.g., sickle cell disease (HbS), sickle cell trait (HbAS), sickle cell-hemoglobin C (HbSC), sickle cell-thalassemia (HbS and HbA), thalassemia (alpha thalassemia and beta thalassemia), hemoglobin C disease (HbCC), hemoglobin C trait (HbAC)), primary immunodeficiencies (e.g., autoimmune lymphoproliferative syndrome (ALPS), APS-1 (APECED), BENTA disease, caspase eight deficiency state (CEDS), CARD9 deficiency and other sydromes of susceptibility to candidiasis, chronic granulomatous disease (CGD), common variable immunodeficiency (CVID), congenital neutropenia syndromes, CTLA4 deficiency, DOCK8 deficiency, GATA2 deficiency, glycosylation disorders with immunodeficiency, hyper-immunoglobulin E syndromes (HIES), hyper-immunoglobulin M syndromes, interferon gamma deficiency, interleukin 12 deficiency, and interleukin 23 deficiency, leukocyte adhesion deficiency (LAD), LRBA deficiency, PI3 kinase disease, PLCG2-associated antibody deficiency and immune dysregulation (PLAID), severe combined immunodeficiency (SCID), STAT3 dominant-negative disease, STAT3 gain-of-function disease, wards, hypogammaglobulinemia, infections, myelokathexis (WHIM) syndrome, Wiskott-Aldrich syndrome (WAS), x-linked agammaglobulinemia (XLA), x-linked lymphoproliferative disease (XLP), XMEN disease), cytopenias (anemia, leukopenia, thrombocytopenia, pancytopenia, autoimmune cytopenia, refractory cytopenia), and/or storage and metabolic disorders (e.g., diabetes, familial hypercholesterolemia, Hunter syndrome, Krabbe disease, Maple syrup urine disease, metachromatic leukodystrophy, Niemann-Pick, Gaucher's disease, hemochromatosis, phenylketonuria (PKU), mitochondrial disorders, Porphyria, Tay-Sachs disease, Wilson's disease).

### Exon Skipping

[0217] In some embodiments, the nucleotide sequences may encode nucleic acids capable of inducing exon skipping. Such encoded nucleic acids may be antisense oligonucleotides or antisense nucleotide systems. As used herein, the term “exon skipping” refers to the modification of pre-mRNA splicing by the targeting of splice donor and/or acceptor sites within a pre-mRNA with one or more complementary antisense oligonucleotide(s) (AONs). By blocking access of a spliceosome to one or more splice donor or acceptor site, an AON may prevent a splicing reaction thereby causing the deletion of one or more exons from a fully-processed mRNA. Exon skipping may be achieved in the nucleus during the maturation process of pre-mRNAs. In some examples, exon skipping may include the masking of key sequences involved in the splicing of targeted exons by using antisense oligonucleotides (AON) that are complementary to splice donor sequences within a pre-mRNA.

### CRISPR-Cas System Cargo Molecules

[0218] In some embodiments, the engineered viral (e.g., AAV) or other particles described herein can include one or more CRISPR-Cas system molecules, which can be polynucleotides or polypeptides. In some embodiments, the polynucleotides can encode one or more CRISPR-Cas system molecules. In some embodiments, the polynucleotide encodes a Cas protein, a CRISPR Cascade protein, a gRNA, or a combination thereof. Other CRISPR-Cas system molecules are discussed elsewhere herein and can be delivered either as a polypeptide or a polynucleotide.

[0219] In general, a CRISPR-Cas or CRISPR system as used in herein and in documents, such as International Patent Application Publication WO 2014/093622 (PCT/US2013/074667), refers collectively to transcripts and other elements involved in the expression of or directing the activity of CRISPR-associated (“Cas”) genes, including sequences encoding a Cas gene, a tracr (trans-activating CRISPR) sequence (e.g., tracrRNA or an active partial tracrRNA), a tracr-mate sequence (encompassing a “direct repeat” and a tracrRNA-processed partial direct repeat in the context of an endogenous CRISPR system), a guide sequence (also referred to as a “spacer” in the context of an endogenous CRISPR system), or “RNA(s)” as that term is herein used (e.g., RNA(s) to guide Cas, such as Cas9, e.g. CRISPR RNA and transactivating (tracr) RNA or a single guide RNA (sgRNA) (chimeric RNA)) or other sequences and transcripts from a CRISPR locus. In general, a CRISPR system is characterized by elements that promote the formation of a CRISPR complex at the site of a target sequence (also referred to as a protospacer in the context of an endogenous CRISPR system). See, e.g., Shmakov et al. (2015) “Discovery and Functional Characterization of Diverse Class 2 CRISPR-Cas Systems”, Molecular Cell, DOI: dx.doi.org/10.1016/j.molcel.2015.10.008.

[0220] In certain embodiments, a protospacer adjacent motif (PAM) or PAM-like motif directs binding of the effector protein complex as disclosed herein to the target locus of interest. In some embodiments, the PAM may be a 5′ PAM (i.e., located upstream of the 5′ end of the protospacer). In other embodiments, the PAM may be a 3′ PAM (i.e., located downstream of the 5′ end of the protospacer). The term “PAM” may be used interchangeably with the term “PFS” or “protospacer flanking site” or “protospacer flanking sequence”.

[0221] In a preferred embodiment, the CRISPR effector protein may recognize a 3′ PAM. In certain embodiments, the CRISPR effector protein may recognize a 3′ PAM which is 5′H, wherein H is A, C or U.

[0222] In the context of formation of a CRISPR complex, “target sequence” refers to a sequence to which a guide sequence is designed to have complementarity, where hybridization between a target sequence and a guide sequence promotes the formation of a CRISPR complex. A target sequence may comprise RNA polynucleotides. The term “target RNA” refers to an RNA polynucleotide being or comprising the target sequence. In other words, the target RNA may be an RNA polynucleotide or a part of a RNA polynucleotide to which a part of the gRNA. i.e., the guide sequence, is designed to have complementarity and to which the effector function mediated by the complex comprising CRISPR effector protein and a gRNA is to be directed. In some embodiments, a target sequence is located in the nucleus or cytoplasm of a cell.

[0223] In certain example embodiments, the CRISPR effector protein may be delivered using a nucleic acid molecule encoding the CRISPR effector protein. The nucleic acid molecule encoding a CRISPR effector protein, may advantageously be a codon optimized CRISPR effector protein. An example of a codon optimized sequence is in this instance a sequence optimized for expression in eukaryote, e.g., humans (i.e., being optimized for expression in humans), or for another eukaryote, animal or mammal as herein discussed; see, e.g., SaCas9 human codon optimized sequence in International Patent Application Publication WO 2014/093622 (PCT/US2013/074667). Whilst this is preferred, it will be appreciated that other examples are possible and codon optimization for a host species other than human, or for codon optimization for specific organs is known. In some embodiments, an enzyme coding sequence encoding a CRISPR effector protein is codon optimized for expression in particular cells, such as eukaryotic cells. The eukaryotic cells may be those of or derived from a particular organism, such as a plant or a mammal, including but not limited to human, or non-human eukaryote or animal or mammal as herein discussed, e.g., mouse, rat, rabbit, dog, livestock, or non-human mammal or primate. In some embodiments, processes for modifying the germ line genetic identity of human beings and/or processes for modifying the genetic identity of animals which are likely to cause them suffering without any substantial medical benefit to man or animal, and also animals resulting from such processes, may be excluded. In general, codon optimization refers to a process of modifying a nucleic acid sequence for enhanced expression in the host cells of interest by replacing at least one codon (e.g., about or more than about 1, 2, 3, 4, 5, 10, 15, 20, 25, 50, or more codons) of the native sequence with codons that are more frequently or most frequently used in the genes of that host cell while maintaining the native amino acid sequence. Various species exhibit particular bias for certain codons of a particular amino acid. Codon bias (differences in codon usage between organisms) often correlates with the efficiency of translation of messenger RNA (mRNA), which is in turn believed to be dependent on, among other things, the properties of the codons being translated and the availability of particular transfer RNA (tRNA) molecules. The predominance of selected tRNAs in a cell is generally a reflection of the codons used most frequently in peptide synthesis. Accordingly, genes can be tailored for optimal gene expression in a given organism based on codon optimization. Codon usage tables are readily available, for example, at the “Codon Usage Database” available at kazusa.orjp/codon/and these tables can be adapted in a number of ways. See Nakamura, Y., et al. “Codon usage tabulated from the international DNA sequence databases: status for the year 2000” Nucl. Acids Res. 28:292 (2000). Computer algorithms for codon optimizing a particular sequence for expression in a particular host cell are also available, such as Gene Forge (Aptagen; Jacobus, PA), are also available. In some embodiments, one or more codons (e.g., 1, 2, 3, 4, 5, 10, 15, 20, 25, 50, or more, or all codons) in a sequence encoding a Cas correspond to the most frequently used codon for a particular amino acid.

[0224] In certain embodiments, the methods as described herein may comprise providing a Cas transgenic cell in which one or more nucleic acids encoding one or more guide RNAs are provided or introduced operably connected in the cell with a regulatory element comprising a promoter of one or more genes of interest. As used herein, the term “Cas transgenic cell” refers to a cell, such as a eukaryotic cell, in which a Cas gene has been genomically integrated. The nature, type, or origin of the cell are not particularly limiting according to the present invention. Also, the way the Cas transgene is introduced in the cell may vary and can be any method as is known in the art. In certain embodiments, the Cas transgenic cell is obtained by introducing the Cas transgene in an isolated cell. In certain other embodiments, the Cas transgenic cell is obtained by isolating cells from a Cas transgenic organism. By means of example, and without limitation, the Cas transgenic cell as referred to herein may be derived from a Cas transgenic eukaryote, such as a Cas knock-in eukaryote. Reference is made to International Patent Application Publication WO 2014/093622 (PCT/US13/74667), incorporated herein by reference. Methods of US Patent Publication Nos. 20120017290 and 20110265198 assigned to Sangamo BioSciences, Inc. directed to targeting the Rosa locus may be modified to utilize the CRISPR Cas system of the present invention. Methods of US Patent Publication No. 20130236946 assigned to Cellectis directed to targeting the Rosa locus may also be modified to utilize the CRISPR Cas system of the present invention. By means of further example reference is made to Platt et. al. (Cell; 159(2):440-455 (2014)), describing a Cas9 knock-in mouse, which is incorporated herein by reference. The Cas transgene can further comprise a Lox-Stop-polyA-Lox(LSL) cassette thereby rendering Cas expression inducible by Cre recombinase. Alternatively, the Cas transgenic cell may be obtained by introducing the Cas transgene in an isolated cell. Delivery systems for transgenes are well known in the art. By means of example, the Cas transgene may be delivered in for instance eukaryotic cell by means of vector (e.g., AAV, adenovirus, lentivirus) and/or particle and/or nanoparticle delivery, as also described herein elsewhere. Lentiviral and retroviral systems, as well as non-viral systems for delivering CRISPR-Cas system components are generally known in the art. AAV and adenovirus-based systems for CRISPR-Cas system components are generally known in the art as well as described herein (e.g., the engineered AAVs of the present invention).

[0225] It will be understood by the skilled person that the cell, such as the Cas transgenic cell, as referred to herein may comprise further genomic alterations besides having an integrated Cas gene or the mutations arising from the sequence specific action of Cas when complexed with RNA capable of guiding Cas to a target locus.

[0226] In certain embodiments the invention involves vectors, e.g., for delivering or introducing in a cell Cas and/or RNA capable of guiding Cas to a target locus (i.e., guide RNA), but also for propagating these components (e.g., in prokaryotic cells). This can be in addition to delivery of one or more CRISPR-Cas components or other gene modification system component not already being delivered by an engineered AAV particle described herein. As used herein, a “vector” is a tool that allows or facilitates the transfer of an entity from one environment to another. It is a replicon, such as a plasmid, phage, or cosmid, into which another DNA segment may be inserted so as to bring about the replication of the inserted segment. Generally, a vector is capable of replication when associated with the proper control elements. In general, the term “vector” refers to a nucleic acid molecule capable of transporting another nucleic acid to which it has been linked. Vectors include, but are not limited to, nucleic acid molecules that are single-stranded, double-stranded, or partially double-stranded; nucleic acid molecules that comprise one or more free ends, no free ends (e.g., circular); nucleic acid molecules that comprise DNA, RNA, or both; and other varieties of polynucleotides known in the art. One type of vector is a “plasmid,” which refers to a circular double stranded DNA loop into which additional DNA segments can be inserted, such as by standard molecular cloning techniques. Another type of vector is a viral vector, wherein virally-derived DNA or RNA sequences are present in the vector for packaging into a virus (e.g., retroviruses, replication defective retroviruses, adenoviruses, replication defective adenoviruses, and adeno-associated viruses (AAVs)). Viral vectors also include polynucleotides carried by a virus for transfection into a host cell. Certain vectors are capable of autonomous replication in a host cell into which they are introduced (e.g., bacterial vectors having a bacterial origin of replication and episomal mammalian vectors). Other vectors (e.g., non-episomal mammalian vectors) are integrated into the genome of a host cell upon introduction into the host cell, and thereby are replicated along with the host genome. Moreover, certain vectors are capable of directing the expression of genes to which they are operatively-linked. Such vectors are referred to herein as “expression vectors.” Common expression vectors of utility in recombinant DNA techniques are often in the form of plasmids.

[0227] Recombinant expression vectors can comprise a nucleic acid of the invention in a form suitable for expression of the nucleic acid in a host cell, which means that the recombinant expression vectors include one or more regulatory elements, which may be selected on the basis of the host cells to be used for expression, that is operatively-linked to the nucleic acid sequence to be expressed. Within a recombinant expression vector, “operably linked” is intended to mean that the nucleotide sequence of interest is linked to the regulatory element(s) in a manner that allows for expression of the nucleotide sequence (e.g., in an in vitro transcription/translation system or in a host cell when the vector is introduced into the host cell). With regards to recombination and cloning methods, mention is made of U.S. Patent Application Publication 2004/0171156, the contents of which are herein incorporated by reference in their entirety. Thus, the embodiments disclosed herein may also comprise transgenic cells comprising the CRISPR effector system. In certain example embodiments, the transgenic cell may function as an individual discrete volume. In other words, samples comprising a masking construct may be delivered to a cell, for example in a suitable delivery vesicle and if the target is present in the delivery vesicle the CRISPR effector is activated and a detectable signal generated.

[0228] The vector(s) can include the regulatory element(s), e.g., promoter(s). The vector(s) can comprise Cas encoding sequences, and/or a single, but possibly also can comprise at least 3 or 8 or 16 or 32 or 48 or 50 guide RNA(s) (e.g., sgRNAs) encoding sequences, such as 1-2, 1-3, 1-4 1-5, 3-6, 3-7, 3-8, 3-9, 3-10, 3-8, 3-16, 3-30, 3-32, 3-48, 3-50 RNA(s) (e.g., sgRNAs). In a single vector there can be a promoter for each RNA (e.g., sgRNA), advantageously when there are up to about 16 RNA(s); and, when a single vector provides for more than 16 RNA(s), one or more promoter(s) can drive expression of more than one of the RNA(s), e.g., when there are 32 RNA(s), each promoter can drive expression of two RNA(s), and when there are 48 RNA(s), each promoter can drive expression of three RNA(s). By simple arithmetic and well established cloning protocols and the teachings in this disclosure one skilled in the art can readily practice the invention as to the RNA(s) for a suitable exemplary vector such as AAV, and a suitable promoter such as the U6 promoter. For example, the packaging limit of AAV is ˜4.7 kb. The length of a single U6-gRNA (plus restriction sites for cloning) is 361 bp. Therefore, the skilled person can readily fit about 12-16, e.g., 13 U6-gRNA cassettes in a single vector. This can be assembled by any suitable means, such as a golden gate strategy used for TALE assembly (genome-engineering.org/taleffectors/). The skilled person can also use atandem guide strategy to increase the number of U6-gRNAs by approximately 1.5 times, e.g., to increase from 12-16, e.g., 13 to approximately 18-24, e.g., about 19 U6-gRNAs. Therefore, one skilled in the art can readily reach approximately 18-24, e.g., about 19 promoter-RNAs, e.g., U6-gRNAs in a single vector, e.g., an AAV vector. A further means for increasing the number of promoters and RNAs in a vector is to use a single promoter (e.g., U6) to express an array of RNAs separated by cleavable sequences. And an even further means for increasing the number of promoter-RNAs in a vector, is to express an array of promoter-RNAs separated by cleavable sequences in the intron of a coding sequence or gene; and, in this instance it is advantageous to use a polymerase II promoter, which can have increased expression and enable the transcription of long RNA in a tissue specific manner. (see e.g., nar.oxfordjoumals.org/content/34/7/e53.short and nature.com/mt/joumal/v16/n9/abs/mt2008144a.html). In an advantageous embodiment, AAV may package U6 tandem gRNA targeting up to about 50 genes. Accordingly, from the knowledge in the art and the teachings in this disclosure the skilled person can readily make and use vector(s), e.g., a single vector, expressing multiple RNAs or guides under the control or operatively or functionally linked to one or more promoters—especially as to the numbers of RNAs or guides discussed herein, without any undue experimentation.

[0229] The guide RNA(s) encoding sequences and/or Cas encoding sequences, can be functionally or operatively linked to regulatory element(s) and hence the regulatory element(s) drive expression. The promoter(s) can be constitutive promoter(s) and/or conditional promoter(s) and/or inducible promoter(s) and/or tissue specific promoter(s). The promoter can be selected from the group consisting of RNA polymerases, pol I, pol II, pol III, T7, U6, H1, retroviral Rous sarcoma virus (RSV) LTR promoter, the cytomegalovirus (CMV) promoter, the SV40 promoter, the dihydrofolate reductase promoter, the β-actin promoter, the phosphoglycerol kinase (PGK) promoter, and the EF1α promoter. An advantageous promoter is the promoter is U6.

[0230] Additional effectors for use according to the invention can be identified by their proximity to cas1 genes, for example, though not limited to, within the region 20 kb from the start of the cas1 gene and 20 kb from the end of the cas1 gene. In certain embodiments, the effector protein comprises at least one HEPN domain and at least 500 amino acids, and wherein the C2c2 effector protein is naturally present in a prokaryotic genome within 20 kb upstream or downstream of a Cas gene or a CRISPR array. Non-limiting examples of Cas proteins include Cas1, Cas1B, Cas2, Cas3, Cas4, Cas5, Cas6, Cas7, Cas8, Cas9 (also known as Csn1 and Csx12), Cas10, Cas 12, Cas 12a, Cas 13a, Cas 13b, Csy1, Csy2, Csy3, Cse1, Cse2, Csc1, Csc2, Csa5, Csn2, Csm2, Csm3, Csm4, Csm5, Csm6, Cmr1, Cmr3, Cmr4, Cmr5, Cmr6, Csb1, Csb2, Csb3, Csx17, Csx14, Csx10, Csx16, CsaX, Csx3, Csx1, Csx15, Csf1, Csf2, Csf3, Csf4, homologues thereof, or modified versions thereof. In certain example embodiments, the C2c2 effector protein is naturally present in a prokaryotic genome within 20 kb upstream or downstream of a Cas 1 gene. The terms “orthologue” (also referred to as “ortholog” herein) and “homologue” (also referred to as “homolog” herein) are well known in the art. By means of further guidance, a “homologue” of a protein as used herein is a protein of the same species which performs the same or a similar function as the protein it is a homologue of Homologous proteins may but need not be structurally related or are only partially structurally related. An “orthologue” of a protein as used herein is a protein of a different species which performs the same or a similar function as the protein it is an orthologue of. Orthologous proteins may but need not be structurally related or are only partially structurally related.

[0231] In some embodiments, one or more elements of a nucleic acid-targeting system is derived from a particular organism comprising an endogenous CRISPR RNA-targeting system. In certain embodiments, the CRISPR RNA-targeting system is found in Eubacterium and Ruminococcus. In certain embodiments, the effector protein comprises targeted and collateral ssRNA cleavage activity. In certain embodiments, the effector protein comprises dual HEPN domains. In certain embodiments, the effector protein lacks a counterpart to the Helical-1 domain of Cas13a. In certain embodiments, the effector protein is smaller than previously characterized class 2 CRISPR effectors, with a median size of 928 aa. This median size is 190 aa (17%) less than that of Cas13c, more than 200 aa (18%) less than that of Cas13b, and more than 300 aa (26%) less than that of Cas13a. In certain embodiments, the effector protein has no requirement for a flanking sequence (e.g., PFS, PAM).

[0232] In certain embodiments, the effector protein locus structures include a WYL domain containing accessory protein (so denoted after three amino acids that were conserved in the originally identified group of these domains; see, e.g., WYL domain TPR026881). In certain embodiments, the WYL domain accessory protein comprises at least one helix-turn-helix (HTH) or ribbon-helix-helix (RHH) DNA-binding domain. In certain embodiments, the WYL domain containing accessory protein increases both the targeted and the collateral ssRNA cleavage activity of the RNA-targeting effector protein. In certain embodiments, the WYL domain containing accessory protein comprises an N-terminal RHH domain, as well as a pattern of primarily hydrophobic conserved residues, including an invariant tyrosine-leucine doublet corresponding to the original WYL motif. In certain embodiments, the WYL domain containing accessory protein is WYL1. WYL1 is a single WYL-domain protein associated primarily with Ruminococcus.

[0233] In other example embodiments, the Type VI RNA-targeting Cas enzyme is Cas 13d. In certain embodiments, Cas13d is Eubacterium siraeum DSM 15702 (EsCas13d) or Ruminococcus sp. N15.MGS-57 (RspCas13d) (see, e.g., Yan et al., Cas13d Is a Compact RNA-Targeting Type VI CRISPR Effector Positively Modulated by a WYL-Domain-Containing Accessory Protein, Molecular Cell (2018), doi.org/10.1016/j.molcel.2018.02.028). RspCas13d and EsCas13d have no flanking sequence requirements (e.g., PFS, PAM).

[0234] The methods, systems, and tools provided herein may be designed for use with Class 1 CRISPR proteins, which may be Type I. Type III or Type IV Cas proteins as described in Makarova et al., The CRISPR Journal, v. 1, n., 5 (2018); DOI: 10.1089/crispr.2018.0033, incorporated in its entirety herein by reference, and particularly as described in FIG. 1, p. 326. The Class 1 systems typically use a multi-protein effector complex, which can, in some embodiments, include ancillary proteins, such as one or more proteins in a complex referred to as a CRISPR-associated complex for antiviral defense (Cascade), one or more adaptation proteins (e.g., Cas1, Cas2, RNA nuclease), and/or one or more accessory proteins (e.g. Cas 4, DNA nuclease), CRISPR associated Rossman fold (CARF) domain containing proteins, and/or RNA transcriptase. Although Class 1 systems have limited sequence similarity, Class 1 system proteins can be identified by their similar architectures, including one or more Repeat Associated Mysterious Protein (RAMP) family subunits, e.g., Cas5, Cas6, Cas7. RAMP proteins are characterized by having one or more RNA recognition motif domains. Large subunits (for example cas8 or cas10) and small subunits (for example, cas11) are also typical of Class 1 systems. See, e.g., FIGS. 1 and 2. Koonin E V, Makarova K S. 2019 Origins and evolution of CRISPR-Cas systems. Phil. Trans. R. Soc. B 374: 20180087, DOI: 10.1098/rstb.2018.0087. In one embodiment, Class 1 systems are characterized by the signature protein Cas3. The Cascade in particular Class1 proteins can comprise a dedicated complex of multiple Cas proteins that binds pre-crRNA and recruits an additional Cas protein, for example Cas6 or Cas5, which is the nuclease directly responsible for processing pre-crRNA. In one embodiment, the Type I CRISPR protein comprises an effector complex comprises one or more Cas5 subunits and two or more Cas7 subunits. Class 1 subtypes include Type I-A, I-B, I-C, I-U, I-D, I-E, and I-F, Type IV-A and IV-B, and Type III-A, III-D, III-C, and III-B. Class 1 systems also include CRISPR-Cas variants, including Type I-A, I-B, I-E, I-F and I-U variants, which can include variants carried by transposons and plasmids, including versions of subtype I-F encoded by a large family of Tn7-like transposon and smaller groups of Tn7-like transposons that encode similarly degraded subtype I-B systems. Peters et al., PNAS 114 (35) (2017); DOI: 10.1073/pnas.1709035114; see also, Makarova et al, the CRISPR Journal, v. 1, n5, FIG. 5.

### Cas Molecules

[0235] In some embodiments, the cargo molecule can be or include a Cas polypeptide and/or a polynucleotide that can encode a Cas polypeptide or a fragment thereof. Any Cas molecule can be a cargo molecule. In some embodiments, the cargo molecule is Class I CRISPR-Cas system Cas polypeptide. In some embodiments, the cargo molecule is a Class II CRISPR-Cas system Cas polypeptide. In some embodiments, the Cas polypeptide is a Type I Cas polypeptides. In some embodiments, the Cas polypeptide is a Type II Cas polypeptides. In some embodiments, the Cas polypeptides is a Type III Cas polypeptide. In some embodiments, the Cas polypeptides is a Type IV Cas polypeptide. In some embodiments, the Cas polypeptides is a Type V Cas polypeptide. In some embodiments, the Cas polypeptides is a Type VI Cas polypeptide. In some embodiments, the Cas polypeptides is a Type VII Cas polypeptide. Non-limiting examples of Cas proteins include Cas1, Cas1B, Cas2, Cas3, Cas4, Cas5, Cas6, Cas7, Cas8, Cas9 (also known as Csn1 and Csx12), Cas10, Cas 12, Cas 12a, Cas 13a, Cas 13b, Cas 13c, Cas 13d, Csy1, Csy2, Csy3, Cse1, Cse2, Csc1, Csc2, Csa5, Csn2, Csm2, Csm3, Csm4, Csm5, Csm6, Cmr1, Cmr3, Cmr4, Cmr5, Cmr6, Csb1, Csb2, Csb3, Csx17, Csx14, Csx10, Csx16, CsaX, Csx3, Csx1, Csx15, Csf1, Csf2, Csf3, Csf4, homologues thereof, or modified versions thereof.

### Guide Sequences

[0236] As used herein, the term “guide sequence” and “guide molecule” in the context of a CRISPR-Cas system, comprises any polynucleotide sequence having sufficient complementarity with a target nucleic acid sequence to hybridize with the target nucleic acid sequence and direct sequence-specific binding of a nucleic acid-targeting complex to the target nucleic acid sequence. The guide sequences made using the methods disclosed herein may be a full-length guide sequence, a truncated guide sequence, a full-length sgRNA sequence, a truncated sgRNA sequence, or an E+F sgRNA sequence. Each gRNA may be designed to include multiple binding recognition sites (e.g., aptamers) specific to the same or different adapter proteins. Each gRNA may be designed to bind to the promoter region −1000-+1 nucleic acids upstream of the transcription start site (i.e., TSS), preferably −200 nucleic acids. This positioning improves functional domains which affect gene activation (e.g., transcription activators) or gene inhibition (e.g., transcription repressors). The modified gRNA may be one or more modified gRNAs targeted to one or more target loci (e.g., at least 1 gRNA, at least 2 gRNA, at least 5 gRNA, at least 10 gRNA, at least 20 gRNA, at least 30 g RNA, at least 50 gRNA) comprised in a composition. Said multiple gRNA sequences can be tandemly arranged and are preferably separated by a direct repeat.

[0237] In some embodiments, the degree of complementarity of the guide sequence to a given target sequence, when optimally aligned using a suitable alignment algorithm, is about or more than about 50%, 60%, 70%, 75%, 80%, 85%, 90%, 95%, 97.5%, 99%, or more. In certain example embodiments, the guide molecule comprises a guide sequence that may be designed to have at least one mismatch with the target sequence, such that an RNA duplex formed between the guide sequence and the target sequence. Accordingly, the degree of complementarity is preferably less than 99%. For instance, where the guide sequence consists of 24 nucleotides, the degree of complementarity is more particularly about 96% or less. In particular embodiments, the guide sequence is designed to have a stretch of two or more adjacent mismatching nucleotides, such that the degree of complementarity over the entire guide sequence is further reduced. For instance, where the guide sequence consists of 24 nucleotides, the degree of complementarity is more particularly about 96% or less, more particularly, about 92% or less, more particularly about 88% or less, more particularly about 84% or less, more particularly about 80% or less, more particularly about 76% or less, more particularly about 72% or less, depending on whether the stretch of two or more mismatching nucleotides encompasses 2, 3, 4, 5, 6 or 7 nucleotides, etc. In some embodiments, aside from the stretch of one or more mismatching nucleotides, the degree of complementarity, when optimally aligned using a suitable alignment algorithm, is about or more than about 50%, 60%, 70%, 75%, 80%, 85%, 90%, 95%, 97.5%, 99%, or more. Optimal alignment may be determined with the use of any suitable algorithm for aligning sequences, non-limiting examples of which include the Smith-Waterman algorithm, the Needleman-Wunsch algorithm, algorithms based on the Burrows-Wheeler Transform (e.g., the Burrows Wheeler Aligner), ClustalW, Clustal X, BLAT, Novoalign (Novocraft Technologies; available at novocraft.com), ELAND (Illumina, San Diego, CA), SOAP (available at soap.genomics.org.cn), and Maq (available at maq.sourceforge.net). The ability of a guide sequence (within a nucleic acid-targeting guide RNA) to direct sequence-specific binding of a nucleic acid-targeting complex to a target nucleic acid sequence may be assessed by any suitable assay. For example, the components of a nucleic acid-targeting CRISPR system sufficient to form a nucleic acid-targeting complex, including the guide sequence to be tested, may be provided to a host cell having the corresponding target nucleic acid sequence, such as by transfection with vectors encoding the components of the nucleic acid-targeting complex, followed by an assessment of preferential targeting (e.g., cleavage) within the target nucleic acid sequence, such as by Surveyor assay as described herein. Similarly, cleavage of a target nucleic acid sequence (or a sequence in the vicinity thereof) may be evaluated in a test tube by providing the target nucleic acid sequence, components of a nucleic acid-targeting complex, including the guide sequence to be tested and a control guide sequence different from the test guide sequence, and comparing binding or rate of cleavage at or in the vicinity of the target sequence between the test and control guide sequence reactions. Other assays are possible, and will occur to those skilled in the art. A guide sequence, and hence a nucleic acid-targeting guide RNA may be selected to target any target nucleic acid sequence.

[0238] As used herein, the term “crRNA” or “guide RNA” or “single guide RNA” or “sgRNA” or “one or more nucleic acid components” of a Type V or Type VI CRISPR-Cas locus effector protein comprises any polynucleotide sequence having sufficient complementarity with a target nucleic acid sequence to hybridize with the target nucleic acid sequence and direct sequence-specific binding of a nucleic acid-targeting complex to the target nucleic acid sequence. In some embodiments, the degree of complementarity, when optimally aligned using a suitable alignment algorithm, is about or more than about 50%, 60%, 75%, 80%, 85%, 90%, 95%, 97.5%, 99%, or more. Optimal alignment may be determined with the use of any suitable algorithm for aligning sequences, non-limiting example of which include the Smith-Waterman algorithm, the Needleman-Wunsch algorithm, algorithms based on the Burrows-Wheeler Transform (e.g., the Burrows Wheeler Aligner), ClustalW, Clustal X, BLAT, Novoalign (Novocraft Technologies; available at novocraft.com), ELAND (Illumina, San Diego, CA), SOAP (available at soap.genomics.org.cn), and Maq (available at maq.sourceforge.net). The ability of a guide sequence (within a nucleic acid-targeting guide RNA) to direct sequence-specific binding of a nucleic acid-targeting complex to a target nucleic acid sequence may be assessed by any suitable assay. For example, the components of a nucleic acid-targeting CRISPR system sufficient to form a nucleic acid-targeting complex, including the guide sequence to be tested, may be provided to a host cell having the corresponding target nucleic acid sequence, such as by transfection with vectors encoding the components of the nucleic acid-targeting complex, followed by an assessment of preferential targeting (e.g., cleavage) within the target nucleic acid sequence, such as by Surveyor assay as described herein. Similarly, cleavage of a target nucleic acid sequence may be evaluated in a test tube by providing the target nucleic acid sequence, components of a nucleic acid-targeting complex, including the guide sequence to be tested and a control guide sequence different from the test guide sequence, and comparing binding or rate of cleavage at the target sequence between the test and control guide sequence reactions. Other assays are possible, and will occur to those skilled in the art. A guide sequence, and hence a nucleic acid-targeting guide may be selected to target any target nucleic acid sequence. The target sequence may be DNA. The target sequence may be any RNA sequence. In some embodiments, the target sequence may be a sequence within a RNA molecule selected from the group consisting of messenger RNA (mRNA), pre-mRNA, ribosomal RNA (rRNA), transfer RNA (tRNA), micro-RNA (miRNA), small interfering RNA (siRNA), small nuclear RNA (snRNA), small nucleolar RNA (snoRNA), double stranded RNA (dsRNA), non-coding RNA (ncRNA), long non-coding RNA (lncRNA), and small cytoplasmatic RNA (scRNA). In some preferred embodiments, the target sequence may be a sequence within an RNA molecule selected from the group consisting of mRNA, pre-mRNA, and rRNA. In some preferred embodiments, the target sequence may be a sequence within an RNA molecule selected from the group consisting of ncRNA, and lncRNA. In some more preferred embodiments, the target sequence may be a sequence within an mRNA molecule or a pre-mRNA molecule.

[0239] In some embodiments, a nucleic acid-targeting guide is selected to reduce the degree secondary structure within the nucleic acid-targeting guide. In some embodiments, about or less than about 75%, 50%, 40%, 30%, 25%, 20%, 15%, 10%, 5%, 1%, or fewer of the nucleotides of the nucleic acid-targeting guide participate in self-complementary base pairing when optimally folded. Optimal folding may be determined by any suitable polynucleotide folding algorithm. Some programs are based on calculating the minimal Gibbs free energy. An example of one such algorithm is mFold, as described by Zuker and Stiegler (Nucleic Acids Res. 9 (1981), 133-148). Another example folding algorithm is the online webserver RNAfold, developed at Institute for Theoretical Chemistry at the University of Vienna, using the centroid structure prediction algorithm (see e.g., A. R. Gruber et al., 2008, Cell 106(1): 23-24; and PA Carr and GM Church, 2009, Nature Biotechnology 27(12): 1151-62). In certain embodiments, a guide RNA or crRNA may comprise, consist essentially of, or consist of a direct repeat (DR) sequence and a guide sequence or spacer sequence. In certain embodiments, the guide RNA or crRNA may comprise, consist essentially of, or consist of a direct repeat sequence fused or linked to a guide sequence or spacer sequence. In certain embodiments, the direct repeat sequence may be located upstream (i.e., 5′) from the guide sequence or spacer sequence. In other embodiments, the direct repeat sequence may be located downstream (i.e., 3′) from the guide sequence or spacer sequence.

[0240] In certain embodiments, the crRNA comprises a stem loop, preferably a single stem loop. In certain embodiments, the direct repeat sequence forms a stem loop, preferably a single stem loop.

[0241] In certain embodiments, the spacer length of the guide RNA is from 15 to 35 nt. In certain embodiments, the spacer length of the guide RNA is at least 15 nucleotides. In certain embodiments, the spacer length is from 15 to 17 nt, e.g., 15, 16, or 17 nt, from 17 to 20 nt, e.g., 17, 18, 19, or 20 nt, from 20 to 24 nt, e.g., 20, 21, 22, 23, or 24 nt, from 23 to 25 nt, e.g., 23, 24, or 25 nt, from 24 to 27 nt, e.g., 24, 25, 26, or 27 nt, from 27-30 nt, e.g., 27, 28, 29, or 30 nt, from 30-35 nt, e.g., 30, 31, 32, 33, 34, or 35 nt, or 35 nt or longer.

[0242] The “tracrRNA” sequence or analogous terms includes any polynucleotide sequence that has sufficient complementarity with a crRNA sequence to hybridize. In some embodiments, the degree of complementarity between the tracrRNA sequence and crRNA sequence along the length of the shorter of the two when optimally aligned is about or more than about 25%, 30%, 40%, 50%, 60%, 70%, 80%, 90%, 95%, 97.5%, 99%, or higher. In some embodiments, the tracr sequence is about or more than about 5, 6, 7, 8, 9, 10, 11, 12, 13, 14, 15, 16, 17, 18, 19, 20, 25, 30, 40, 50, or more nucleotides in length. In some embodiments, the tracr sequence and crRNA sequence are contained within a single transcript, such that hybridization between the two produces a transcript having a secondary structure, such as a hairpin. In an embodiment of the invention, the transcript or transcribed polynucleotide sequence has at least two or more hairpins. In preferred embodiments, the transcript has two, three, four or five hairpins. In a further embodiment of the invention, the transcript has at most five hairpins. In a hairpin structure the portion of the sequence 5′ of the final “N” and upstream of the loop corresponds to the tracr mate sequence, and the portion of the sequence 3′ of the loop corresponds to the tracr sequence. In general, degree of complementarity is with reference to the optimal alignment of the sca sequence and tracr sequence, along the length of the shorter of the two sequences. Optimal alignment may be determined by any suitable alignment algorithm, and may further account for secondary structures, such as self-complementarity within either the sca sequence or tracr sequence. In some embodiments, the degree of complementarity between the tracr sequence and sca sequence along the length of the shorter of the two when optimally aligned is about or more than about 25%, 30%, 40%, 50%, 60%, 70%, 80%, 90%, 95%, 97.5%, 99%, or higher.

[0243] In general, the CRISPR-Cas, CRISPR-Cas9 or CRISPR system may be as used in the foregoing documents, such as International Patent Application Publication WO 2014/093622 (PCT/US2013/074667) and refers collectively to transcripts and other elements involved in the expression of or directing the activity of CRISPR-associated (“Cas”) genes, including sequences encoding a Cas gene, in particular a Cas9 gene in the case of CRISPR-Cas9, a tracr (trans-activating CRISPR) sequence (e.g. tracrRNA or an active partial tracrRNA), atracr-mate sequence (encompassing a “direct repeat” and a tracrRNA-processed partial direct repeat in the context of an endogenous CRISPR system), a guide sequence (also referred to as a “spacer” in the context of an endogenous CRISPR system), or “RNA(s)” as that term is herein used (e.g., RNA(s) to guide Cas9, e.g., CRISPR RNA and transactivating (tracr) RNA or a single guide RNA (sgRNA) (chimeric RNA)) or other sequences and transcripts from a CRISPR locus. In general, a CRISPR system is characterized by elements that promote the formation of a CRISPR complex at the site of a target sequence (also referred to as a protospacer in the context of an endogenous CRISPR system). In the context of formation of a CRISPR complex, “target sequence” refers to a sequence to which a guide sequence is designed to have complementarity, where hybridization between a target sequence and a guide sequence promotes the formation of a CRISPR complex. The section of the guide sequence through which complementarity to the target sequence is important for cleavage activity is referred to herein as the seed sequence. A target sequence may comprise any polynucleotide, such as DNA or RNA polynucleotides. In some embodiments, a target sequence is located in the nucleus or cytoplasm of a cell, and may include nucleic acids in or from mitochondrial, organelles, vesicles, liposomes or particles present within the cell. In some embodiments, especially for non-nuclear uses. NLSs are not preferred. In some embodiments, a CRISPR system comprises one or more nuclear exports signals (NESs). In some embodiments, a CRISPR system comprises one or more NLSs and one or more NESs. In some embodiments, direct repeats may be identified in silico by searching for repetitive motifs that fulfill any or all of the following criteria: 1. found in a 2Kb window of genomic sequence flanking the type II CRISPR locus; 2. span from 20 to 50 bp; and 3. interspaced by 20 to 50 bp. In some embodiments, 2 of these criteria may be used, for instance 1 and 2, 2 and 3, or 1 and 3. In some embodiments, all 3 criteria may be used.

[0244] In embodiments of the invention the terms guide sequence and guide RNA, i.e., RNA capable of guiding Cas to a target genomic locus, are used interchangeably as in foregoing cited documents such as International Patent Application Publication WO 2014/093622 (PCT/US2013/074667). In general, a guide sequence is any polynucleotide sequence having sufficient complementarity with a target polynucleotide sequence to hybridize with the target sequence and direct sequence-specific binding of a CRISPR complex to the target sequence. In some embodiments, the degree of complementarity between a guide sequence and its corresponding target sequence, when optimally aligned using a suitable alignment algorithm, is about or more than about 50%, 60%, 70%, 75%, 80%, 85%, 90%, 95%, 97.5%, 99%, or more.

[0245] Optimal alignment may be determined with the use of any suitable algorithm for aligning sequences, non-limiting example of which include the Smith-Waterman algorithm, the Needleman-Wunsch algorithm, algorithms based on the Burrows-Wheeler Transform (e.g. the Burrows Wheeler Aligner), ClustalW, Clustal X, BLAT, Novoalign (Novocraft Technologies; available at www.novocraft.com), ELAND (Illumina, San Diego, CA), SOAP (available at soap.genomics.org.cn), and Maq (available at maq.sourceforge.net). In some embodiments, a guide sequence is about or more than about 5, 10, 11, 12, 13, 14, 15, 16, 17, 18, 19, 20, 21, 22, 23, 24, 25, 26, 27, 28, 29, 30, 35, 40, 45, 50, 75, or more nucleotides in length. In some embodiments, a guide sequence is less than about 75, 50, 45, 40, 35, 30, 25, 20, 15, 12, or fewer nucleotides in length. Preferably the guide sequence is 10-30 nucleotides long. The ability of a guide sequence to direct sequence-specific binding of a CRISPR complex to a target sequence may be assessed by any suitable assay. For example, the components of a CRISPR system sufficient to form a CRISPR complex, including the guide sequence to be tested, may be provided to a host cell having the corresponding target sequence, such as by transfection with vectors encoding the components of the CRISPR sequence, followed by an assessment of preferential cleavage within the target sequence, such as by Surveyor assay as described herein. Similarly, cleavage of a target polynucleotide sequence may be evaluated in a test tube by providing the target sequence, components of a CRISPR complex, including the guide sequence to be tested and a control guide sequence different from the test guide sequence, and comparing binding or rate of cleavage at the target sequence between the test and control guide sequence reactions. Other assays are possible, and will occur to those skilled in the art.

[0246] In some embodiments of CRISPR-Cas systems, the degree of complementarity between a guide sequence and its corresponding target sequence can be about or more than about 50%, 60%, 70%, 75%, 80%, 85%, 90%, 95%, 97.5%, 99%, or 100%; a guide or RNA or sgRNA can be about or more than about 5, 10, 11, 12, 13, 14, 15, 16, 17, 18, 19, 20, 21, 22, 23, 24, 25, 26, 27, 28, 29, 30, 35, 40, 45, 50, 75, or more nucleotides in length; or guide or RNA or sgRNA can be less than about 75, 50, 45, 40, 35, 30, 25, 20, 15, 12, or fewer nucleotides in length; and advantageously tracr RNA is 30 or 50 nucleotides in length. However, an embodiment of the invention is to reduce off-target interactions, e.g., reduce the guide interacting with a target sequence having low complementarity. Indeed, in the examples, it is shown that the invention involves mutations that result in the CRISPR-Cas system being able to distinguish between target and off-target sequences that have greater than 80% to about 95% complementarity, e.g., 83%-84% or 88-89% or 94-95% complementarity (for instance, distinguishing between a target having 18 nucleotides from an off-target of 18 nucleotides having 1, 2 or 3 mismatches). Accordingly, in the context of the present invention the degree of complementarity between a guide sequence and its corresponding target sequence is greater than 94.5% or 95% or 95.5% or 96% or 96.5% or 97% or 97.5% or 98% or 98.5% or 99% or 99.5% or 99.9%, or 100%. Off target is less than 100% or 99.9% or 99.5% or 99% or 99% or 98.5% or 98% or 97.5% or 97% or 96.5% or 96% or 95.5% or 95% or 94.5% or 94% or 93% or 92% or 91% or 90% or 89% or 88% or 87% or 86% or 85% or 84% or 83% or 82% or 81% or 80% complementarity between the sequence and the guide, with it advantageous that off target is 100% or 99.9% or 99.5% or 99% or 99% or 98.5% or 98% or 97.5% or 97% or 96.5% or 96% or 95.5% or 95% or 94.5% complementarity between the sequence and the guide.

[0247] In particularly preferred embodiments according to the invention, the guide RNA (capable of guiding Cas to a target locus) may comprise (1) a guide sequence capable of hybridizing to a genomic target locus in the eukaryotic cell; (2) a tracr sequence; and (3) a tracr mate sequence. All (1) to (3) may reside in a single RNA, i.e., an sgRNA (arranged in a 5′ to 3′ orientation), or the tracr RNA may be a different RNA than the RNA containing the guide and tracr sequence. The tracr hybridizes to the tracr mate sequence and directs the CRISPR/Cas complex to the target sequence. Where the tracr RNA is on a different RNA than the RNA containing the guide and tracr sequence, the length of each RNA may be optimized to be shortened from their respective native lengths, and each may be independently chemically modified to protect from degradation by cellular RNase or otherwise increase stability.

[0248] The methods according to the invention as described herein comprehend inducing one or more mutations in a eukaryotic cell (in vitro, i.e., in an isolated eukaryotic cell) as herein discussed comprising delivering to cell a vector as herein discussed. The mutation(s) can include the introduction, deletion, or substitution of one or more nucleotides at each target sequence of cell(s) via the guide(s) RNA(s) or sgRNA(s). The mutations can include the introduction, deletion, or substitution of 1-75 nucleotides at each target sequence of said cell(s) via the guide(s) RNA(s) or sgRNA(s). The mutations can include the introduction, deletion, or substitution of 1, 5, 10, 11, 12, 13, 14, 15, 16, 17, 18, 19, 20, 21, 22, 23, 24, 25, 26, 27, 28, 29, 30, 35, 40, 45, 50, or 75 nucleotides at each target sequence of said cell(s) via the guide(s) RNA(s) or sgRNA(s). The mutations can include the introduction, deletion, or substitution of 5, 10, 11, 12, 13, 14, 15, 16, 17, 18, 19, 20, 21, 22, 23, 24, 25, 26, 27, 28, 29, 30, 35, 40, 45, 50, or 75 nucleotides at each target sequence of said cell(s) via the guide(s) RNA(s) or sgRNA(s). The mutations include the introduction, deletion, or substitution of 10, 11, 12, 13, 14, 15, 16, 17, 18, 19, 20, 21, 22, 23, 24, 25, 26, 27, 28, 29, 30, 35, 40, 45, 50, or 75 nucleotides at each target sequence of said cell(s) via the guide(s) RNA(s) or sgRNA(s). The mutations can include the introduction, deletion, or substitution of 20, 21, 22, 23, 24, 25, 26, 27, 28, 29, 30, 35, 40, 45, 50, or 75 nucleotides at each target sequence of said cell(s) via the guide(s) RNA(s) or sgRNA(s). The mutations can include the introduction, deletion, or substitution of 40, 45, 50, 75, 100, 200, 300, 400 or 500 nucleotides at each target sequence of said cell(s) via the guide(s) RNA(s) or sgRNA(s).

[0249] For minimization of toxicity and off-target effect, it may be important to control the concentration of Cas mRNA and guide RNA delivered. Optimal concentrations of Cas mRNA and guide RNA can be determined by testing different concentrations in a cellular or non-human eukaryote animal model and using deep sequencing the analyze the extent of modification at potential off-target genomic loci. Alternatively, to minimize the level of toxicity and off-target effect, Cas nickase mRNA (for example S. pyogenes Cas9 with the D10A mutation) can be delivered with a pair of guide RNAs targeting a site of interest. Guide sequences and strategies to minimize toxicity and off-target effects can be as in WO 2014/093622 (PCT/US2013/074667); or, via mutation as herein.

[0250] Typically, in the context of an endogenous CRISPR system, formation of a CRISPR complex (comprising a guide sequence hybridized to a target sequence and complexed with one or more Cas proteins) results in cleavage of one or both strands in or near (e.g., within 1, 2, 3, 4, 5, 6, 7, 8, 9, 10, 20, 50, or more base pairs from) the target sequence. Without wishing to be bound by theory, the tracr sequence, which may comprise or consist of all or a portion of a wild-type tracr sequence (e.g., about or more than about 20, 26, 32, 45, 48, 54, 63, 67, 85, or more nucleotides of a wild-type tracr sequence), may also form part of a CRISPR complex, such as by hybridization along at least a portion of the tracr sequence to all or a portion of a tracr mate sequence that is operably linked to the guide sequence.

[0251] In certain embodiments, guides of the invention comprise non-naturally occurring nucleic acids and/or non-naturally occurring nucleotides and/or nucleotide analogs, and/or chemically modifications. Non-naturally occurring nucleic acids can include, for example, mixtures of naturally and non-naturally occurring nucleotides. Non-naturally occurring nucleotides and/or nucleotide analogs may be modified at the ribose, phosphate, and/or base moiety. In an embodiment of the invention, a guide nucleic acid comprises ribonucleotides and non-ribonucleotides. In one such embodiment, a guide comprises one or more ribonucleotides and one or more deoxyribonucleotides. In an embodiment of the invention, the guide comprises one or more non-naturally occurring nucleotide or nucleotide analog such as a nucleotide with phosphorothioate linkage, boranophosphate linkage, a locked nucleic acid (LNA) nucleotides comprising a methylene bridge between the 2′ and 4′ carbons of the ribose ring, peptide nucleic acids (PNA), or bridged nucleic acids (BNA). Other examples of modified nucleotides include 2′-O-methyl analogs, 2′-deoxy analogs, 2-thiouridine analogs, N6-methyladenosine analogs, or 2′-fluoro analogs. Further examples of modified nucleotides include linkage of chemical moieties at the 2′ position, including but not limited to peptides, nuclear localization sequence (NLS), peptide nucleic acid (PNA), polyethylene glycol (PEG), triethylene glycol, or tetraethyleneglycol (TEG). Further examples of modified bases include, but are not limited to, 2-aminopurine, 5-bromo-uridine, pseudouridine (Ψ), N¹-methylpseudouridine (me¹Ψ), 5-methoxyuridine (5moU), inosine, 7-methylguanosine. Examples of guide RNA chemical modifications include, without limitation, incorporation of 2′-O-methyl (M), 2′-O-methyl-3′-phosphorothioate (MS), phosphorothioate (PS), S-constrained ethyl(cEt), 2′-O-methyl-3′-thioPACE (MSP), or 2′-O-methyl-3′-phosphonoacetate (MP) at one or more terminal nucleotides. Such chemically modified guides can comprise increased stability and increased activity as compared to unmodified guides, though on-target vs. off-target specificity is not predictable. (See, Hendel, 2015, Nat Biotechnol. 33(9):985-9, doi: 10.1038/nbt.3290, published online 29 Jun. 2015; Ragdarm et al., 0215, PNAS, E7110-E7111; Allerson et al., J. Med. Chem. 2005, 48:901-904; Bramsen et al., Front. Genet., 2012, 3:154; Deng et al., PNAS, 2015, 112:11870-11875; Sharma et al., MedChemComm., 2014, 5:1454-1471; Hendel et al., Nat. Biotechnol. (2015) 33(9): 985-989; Li et al., Nature Biomedical Engineering, 2017, 1, 0066 DOI:10.1038/s41551-017-0066; Ryan et al., Nucleic Acids Res. (2018) 46(2): 792-803). In some embodiments, the 5′ and/or 3′ end of a guide RNA is modified by a variety of functional moieties including fluorescent dyes, polyethylene glycol, cholesterol, proteins, or detection tags. (See Kelly et al., 2016, J. Biotech. 233:74-83). In certain embodiments, a guide comprises ribonucleotides in a region that binds to a target DNA and one or more deoxyribonucletides and/or nucleotide analogs in a region that binds to Cas9, Cpf1, or C2cl. In an embodiment of the invention, deoxyribonucleotides and/or nucleotide analogs are incorporated in engineered guide structures, such as, without limitation, 5′ and/or 3′ end, stem-loop regions, and the seed region. In certain embodiments, the modification is not in the 5′-handle of the stem-loop regions. Chemical modification in the 5′-handle of the stem-loop region of a guide may abolish its function (see Li, et al., Nature Biomedical Engineering, 2017, 1:0066). In certain embodiments, at least 1, 2, 3, 4, 5, 6, 7, 8, 9, 10, 11, 12, 13, 14, 15, 16, 17, 18, 19, 20, 21, 22, 23, 24, 25, 26, 27, 28, 29, 30, 35, 40, 45, 50, or 75 nucleotides of a guide is chemically modified. In some embodiments, 3-5 nucleotides at either the 3′ or the 5′ end of a guide is chemically modified. In some embodiments, only minor modifications are introduced in the seed region, such as 2′-F modifications. In some embodiments, 2′-F modification is introduced at the 3′ end of a guide. In certain embodiments, three to five nucleotides at the 5′ and/or the 3′ end of the guide are chemically modified with 2′-O-methyl (M), 2′-O-methyl-3′-phosphorothioate (MS), S-constrained ethyl(cEt), 2′-O-methyl-3′-thioPACE (MSP), or 2′-O-methyl-3′-phosphonoacetate (MP). Such modification can enhance genome editing efficiency (see Hendel et al., Nat. Biotechnol. (2015) 33(9): 985-989; Ryan et al., Nucleic Acids Res. (2018) 46(2): 792-803). In certain embodiments, all of the phosphodiester bonds of a guide are substituted with phosphorothioates (PS) for enhancing levels of gene disruption. In certain embodiments, more than five nucleotides at the 5′ and/or the 3′ end of the guide are chemically modified with 2′-O-Me, 2′-F or S-constrained ethyl(cEt). Such chemically modified guide can mediate enhanced levels of gene disruption (see Ragdarm et al., 0215, PNAS, E7110-E7111). In an embodiment of the invention, a guide is modified to comprise a chemical moiety at its 3′ and/or 5′ end. Such moieties include, but are not limited to amine, azide, alkyne, thio, dibenzocyclooctyne (DBCO), Rhodamine, peptides, nuclear localization sequence (NLS), peptide nucleic acid (PNA), polyethylene glycol (PEG), triethylene glycol, or tetraethyleneglycol (TEG). In certain embodiment, the chemical moiety is conjugated to the guide by a linker, such as an alkyl chain. In certain embodiments, the chemical moiety of the modified guide can be used to attach the guide to another molecule, such as DNA, RNA, protein, or nanoparticles. Such chemically modified guide can be used to identify or enrich cells generically edited by a CRISPR system (see Lee et al., eLife, 2017, 6:e25312, DOI:10.7554). In some embodiments, 3 nucleotides at each of the 3′ and 5′ ends are chemically modified. In a specific embodiment, the modifications comprise 2′-O-methyl or phosphorothioate analogs. In a specific embodiment, 12 nucleotides in the tetraloop and 16 nucleotides in the stem-loop region are replaced with 2′-O-methyl analogs. Such chemical modifications improve in vivo editing and stability (see Finn et al., Cell Reports (2018), 22: 2227-2235). In some embodiments, more than 60 or 70 nucleotides of the guide are chemically modified. In some embodiments, this modification comprises replacement of nucleotides with 2′-O-methyl or 2′-fluoro nucleotide analogs or phosphorothioate (PS) modification of phosphodiester bonds. In some embodiments, the chemical modification comprises 2′-O-methyl or 2′-fluoro modification of guide nucleotides extending outside of the nuclease protein when the CRISPR complex is formed or PS modification of 20 to 30 or more nucleotides of the 3′-terminus of the guide. In a particular embodiment, the chemical modification further comprises 2′-O-methyl analogs at the 5′ end of the guide or 2′-fluoro analogs in the seed and tail regions. Such chemical modifications improve stability to nuclease degradation and maintain or enhance genome-editing activity or efficiency, but modification of all nucleotides may abolish the function of the guide (see Yin et al., Nat. Biotech. (2018), 35(12): 1179-1187). Such chemical modifications may be guided by knowledge of the structure of the CRISPR complex, including knowledge of the limited number of nuclease and RNA 2′-OH interactions (see Yin et al., Nat. Biotech. (2018), 35(12): 1179-1187). In some embodiments, one or more guide RNA nucleotides may be replaced with DNA nucleotides. In some embodiments, up to 2, 4, 6, 8, 10, or 12 RNA nucleotides of the 5′-end tail/seed guide region are replaced with DNA nucleotides. In certain embodiments, the majority of guide RNA nucleotides at the 3′ end are replaced with DNA nucleotides. In particular embodiments, 16 guide RNA nucleotides at the 3′ end are replaced with DNA nucleotides. In particular embodiments, 8 guide RNA nucleotides of the 5′-end tail/seed region and 16 RNA nucleotides at the 3′ end are replaced with DNA nucleotides. In particular embodiments, guide RNA nucleotides that extend outside of the nuclease protein when the CRISPR complex is formed are replaced with DNA nucleotides. Such replacement of multiple RNA nucleotides with DNA nucleotides leads to decreased off-target activity but similar on-target activity compared to an unmodified guide; however, replacement of all RNA nucleotides at the 3′ end may abolish the function of the guide (see Yin et al., Nat. Chem. Biol. (2018) 14, 311-316). Such modifications may be guided by knowledge of the structure of the CRISPR complex, including knowledge of the limited number of nuclease and RNA 2′-OH interactions (see Yin et al., Nat. Chem. Biol. (2018) 14, 311-316).

[0252] In one embodiment of the invention, the guide comprises a modified crRNA for Cpf1, having a 5′-handle and a guide segment further comprising a seed region and a 3′-terminus. In some embodiments, the modified guide can be used with a Cpf1 of any one of Acidaminococcus sp. BV3L6 Cpf1 (AsCpf1); Francisella tularensis subsp. Novicida U112 Cpf1 (FnCpf1); L. bacterium MC2017 Cpf1 (Lb3Cpf1); Butyrivibrio proteoclasticus Cpf1 (BpCpf1); Parcubacteria bacterium GWC2011_GWC2_44_17 Cpf1 (PbCpf1); Peregrinibacteria bacterium GW2011_GWA_33_10 Cpf1 (PeCpf1); Leptospira inadai Cpf1 (LiCpf1); Smithella sp. SC_K08D17 Cpf1 (SsCpf1); L. bacterium MA2020 Cpf1 (Lb2Cpf1); Porphyromonas crevioricanis Cpf1 (PcCpf1); Porphyromonas macacae Cpf1 (PmCpf1); Candidatus Methanoplasma termitum Cpf1 (CMtCpf1); Eubacterium eligens Cpf1 (EeCpf1); Moraxella bovoculi 237 Cpf1 (MbCpf1); Prevotella disiens Cpf1 (PdCpf1); or L. bacterium ND2006 Cpf1 (LbCpf1).

[0253] In some embodiments, the modification to the guide is a chemical modification, an insertion, a deletion or a split. In some embodiments, the chemical modification includes, but is not limited to, incorporation of 2′-O-methyl (M) analogs, 2′-deoxy analogs, 2-thiouridine analogs, N6-methyladenosine analogs, 2′-fluoro analogs, 2-aminopurine, 5-bromo-uridine, pseudouridine (Ψ), N¹-methylpseudouridine (me¹Ψ), 5-methoxyuridine(5moU), inosine, 7-methylguanosine, 2′-O-methyl-3′-phosphorothioate (MS), S-constrained ethyl(cEt), phosphorothioate (PS), 2′-O-methyl-3′-thioPACE (MSP), or 2′-O-methyl-3′-phosphonoacetate (MP). In some embodiments, the guide comprises one or more of phosphorothioate modifications. In certain embodiments, at least 1, 2, 3, 4, 5, 6, 7, 8, 9, 10, 11, 12, 13, 14, 15, 16, 17, 18, 19, 20, or 25 nucleotides of the guide are chemically modified. In some embodiments, all nucleotides are chemically modified. In certain embodiments, one or more nucleotides in the seed region are chemically modified. In certain embodiments, one or more nucleotides in the 3′-terminus are chemically modified. In certain embodiments, none of the nucleotides in the 5′-handle is chemically modified. In some embodiments, the chemical modification in the seed region is a minor modification, such as incorporation of a 2′-fluoro analog. In a specific embodiment, one nucleotide of the seed region is replaced with a 2′-fluoro analog. In some embodiments, 5 or 10 nucleotides in the 3′-terminus are chemically modified. Such chemical modifications at the 3′-terminus of the Cpf1 CrRNA improve gene cutting efficiency (see Li, et al., Nature Biomedical Engineering, 2017, 1:0066). In a specific embodiment, 5 nucleotides in the 3′-terminus are replaced with 2′-fluoro analogues. In a specific embodiment, 10 nucleotides in the 3′-terminus are replaced with 2′-fluoro analogues. In a specific embodiment, 5 nucleotides in the 3′-terminus are replaced with 2′-O-methyl (M) analogs. In some embodiments, 3 nucleotides at each of the 3′ and 5′ ends are chemically modified. In a specific embodiment, the modifications comprise 2′-O-methyl or phosphorothioate analogs. In a specific embodiment, 12 nucleotides in the tetraloop and 16 nucleotides in the stem-loop region are replaced with 2′-O-methyl analogs. Such chemical modifications improve in vivo editing and stability (see Finn et al., Cell Reports (2018), 22: 2227-2235).

[0254] In some embodiments, the loop of the 5′-handle of the guide is modified. In some embodiments, the loop of the 5′-handle of the guide is modified to have a deletion, an insertion, a split, or chemical modifications. In certain embodiments, the loop comprises 3, 4, or 5 nucleotides. In certain embodiments, the loop comprises the sequence of UCUU, UUUU, UAUU, or UGUU. In some embodiments, the guide molecule forms a stemloop with a separate non-covalently linked sequence, which can be DNA orRNA.

### Synthetically Linked Guide

[0255] In one embodiment, the guide comprises a tracr sequence and a tracr mate sequence that are chemically linked or conjugated via a non-phosphodiester bond. In one embodiment, the guide comprises a tracr sequence and a tracr mate sequence that are chemically linked or conjugated via a non-nucleotide loop. In some embodiments, the tracr and tracr mate sequences are joined via a non-phosphodiester covalent linker. Examples of the covalent linker include but are not limited to a chemical moiety selected from the group consisting of carbamates, ethers, esters, amides, imines, amidines, aminotrizines, hydrozone, disulfides, thioethers, thioesters, phosphorothioates, phosphorodithioates, sulfonamides, sulfonates, fulfones, sulfoxides, ureas, thioureas, hydrazide, oxime, triazole, photolabile linkages, C—C bond forming groups such as Diels-Alder cyclo-addition pairs or ring-closing metathesis pairs, and Michael reaction pairs.

[0256] In some embodiments, the tracr and tracr mate sequences are first synthesized using the standard phosphoramidite synthetic protocol (Herdewijn, P., ed., Methods in Molecular Biology Col 288, Oligonucleotide Synthesis: Methods and Applications, Humana Press, New Jersey (2012)). In some embodiments, the tracr or tracr mate sequences can be functionalized to contain an appropriate functional group for ligation using the standard protocol known in the art (Hermanson, G. T., Bioconjugate Techniques, Academic Press (2013)). Examples of functional groups include, but are not limited to, hydroxyl, amine, carboxylic acid, carboxylic acid halide, carboxylic acid active ester, aldehyde, carbonyl, chlorocarbonyl, imidazolylcarbonyl, hydrozide, semicarbazide, thio semicarbazide, thiol, maleimide, haloalkyl, sufonyl, ally, propargyl, diene, alkyne, and azide. Once the tracr and the tracr mate sequences are functionalized, a covalent chemical bond or linkage can be formed between the two oligonucleotides. Examples of chemical bonds include, but are not limited to, those based on carbamates, ethers, esters, amides, imines, amidines, aminotrizines, hydrozone, disulfides, thioethers, thioesters, phosphorothioates, phosphorodithioates, sulfonamides, sulfonates, fulfones, sulfoxides, ureas, thioureas, hydrazide, oxime, triazole, photolabile linkages, C—C bond forming groups such as Diels-Alder cyclo-addition pairs or ring-closing metathesis pairs, and Michael reaction pairs. In some embodiments, the tracr and tracr mate sequences can be chemically synthesized. In some embodiments, the chemical synthesis uses automated, solid-phase oligonucleotide synthesis machines with 2′-acetoxyethyl orthoester (2′-ACE) (Scaringe et al., J. Am. Chem. Soc. (1998) 120: 11820-11821; Scaringe, Methods Enzymol. (2000) 317: 3-18) or 2′-thionocarbamate (2′-TC) chemistry (Dellinger et al., J. Am. Chem. Soc. (2011) 133: 11540-11546; Hendel et al., Nat. Biotechnol. (2015) 33:985-989).

[0257] In some embodiments, the tracr and tracr mate sequences can be covalently linked using various bioconjugation reactions, loops, bridges, and non-nucleotide links via modifications of sugar, internucleotide phosphodiester bonds, purine and pyrimidine residues. Sletten et al., Angew. Chem. Int. Ed. (2009) 48:6974-6998; Manoharan, M. Curr. Opin. Chem. Biol. (2004) 8: 570-9; Behlke et al., Oligonucleotides (2008) 18: 305-19; Watts, et al., Drug. Discov. Today (2008) 13: 842-55; Shukla, et al., ChemMedChem (2010) 5: 328-49.

[0258] In some embodiments, the tracr and tracr mate sequences can be covalently linked using click chemistry. In some embodiments, the tracr and tracr mate sequences can be covalently linked using a triazole linker. In some embodiments, the tracr and tracr mate sequences can be covalently linked using Huisgen 1,3-dipolar cycloaddition reaction involving an alkyne and azide to yield a highly stable triazole linker (He et al., ChemBioChem (2015) 17: 1809-1812; WO 2016/186745). In some embodiments, the tracr and tracr mate sequences are covalently linked by ligating a 5′-hexyne tracrRNA and a 3′-azide crRNA. In some embodiments, either or both of the 5′-hexyne tracrRNA and a 3′-azide crRNA can be protected with 2′-acetoxyethl orthoester (2′-ACE) group, which can be subsequently removed using Dharmacon protocol (Scaringe et al., J. Am. Chem. Soc. (1998) 120: 11820-11821; Scaringe, Methods Enzymol. (2000) 317: 3-18).

[0259] In some embodiments, the tracr and tracr mate sequences can be covalently linked via a linker (e.g., a non-nucleotide loop) that comprises a moiety such as spacers, attachments, bioconjugates, chromophores, reporter groups, dye labeled RNAs, and non-naturally occurring nucleotide analogues. More specifically, suitable spacers for purposes of this invention include, but are not limited to, polyethers (e.g., polyethylene glycols, polyalcohols, polypropylene glycol or mixtures of ethylene and propylene glycols), polyamines group (e.g., spennine, spermidine and polymeric derivatives thereof), polyesters (e.g., poly(ethyl acrylate)), polyphosphodiesters, alkylenes, and combinations thereof. Suitable attachments include any moiety that can be added to the linker to add additional properties to the linker, such as but not limited to, fluorescent labels. Suitable bioconjugates include, but are not limited to, peptides, glycosides, lipids, cholesterol, phospholipids, diacyl glycerols and dialkyl glycerols, fatty acids, hydrocarbons, enzyme substrates, steroids, biotin, digoxigenin, carbohydrates, polysaccharides. Suitable chromophores, reporter groups, and dye-labeled RNAs include, but are not limited to, fluorescent dyes such as fluorescein and rhodamine, chemiluminescent, electrochemiluminescent, and bioluminescent marker compounds. The design of example linkers conjugating two RNA components are also described in International Patent Application Publication WO 2004/015075.

[0260] The linker (e.g., a non-nucleotide loop) can be of any length. In some embodiments, the linker has a length equivalent to about 0-16 nucleotides. In some embodiments, the linker has a length equivalent to about 0-8 nucleotides. In some embodiments, the linker has a length equivalent to about 0-4 nucleotides. In some embodiments, the linker has a length equivalent to about 2 nucleotides. Example linker design is also described in International Patent Application Publication WO2011/008730.

[0261] A typical Type II Cas9 sgRNA comprises (in 5′ to 3′ direction): a guide sequence, a poly U tract, a first complimentary stretch (the “repeat”), a loop (tetraloop), a second complimentary stretch (the “anti-repeat” being complimentary to the repeat), a stem, and further stem loops and stems and a poly A (often poly U in RNA) tail (terminator). In preferred embodiments, certain embodiments of guide architecture are retained, certain embodiment of guide architecture cam be modified, for example by addition, subtraction, or substitution of features, whereas certain other embodiments of guide architecture are maintained. Preferred locations for engineered sgRNA modifications, including but not limited to insertions, deletions, and substitutions include guide termini and regions of the sgRNA that are exposed when complexed with CRISPR protein and/or target, for example the tetraloop and/or loop2.

[0262] In certain embodiments, guides of the invention comprise specific binding sites (e.g., aptamers) for adapter proteins, which may comprise one or more functional domains (e.g., via fusion protein). When such a guides forms a CRISPR complex (i.e., CRISPR enzyme binding to guide and target) the adapter proteins bind and, the functional domain associated with the adapter protein is positioned in a spatial orientation which is advantageous for the attributed function to be effective. For example, if the functional domain is a transcription activator (e.g., VP64 or p65), the transcription activator is placed in a spatial orientation which allows it to affect the transcription of the target. Likewise, a transcription repressor will be advantageously positioned to affect the transcription of the target and a nuclease (e.g., Fok1) will be advantageously positioned to cleave or partially cleave the target.

[0263] The skilled person will understand that modifications to the guide which allow for binding of the adapter+functional domain but not proper positioning of the adapter+functional domain (e.g., due to steric hindrance within the three-dimensional structure of the CRISPR complex) are modifications which are not intended. The one or more modified guide may be modified at the tetra loop, the stem loop 1, stem loop 2, or stem loop 3, as described herein, preferably at either the tetra loop or stem loop 2, and most preferably at both the tetra loop and stem loop 2.

[0264] The repeat:anti repeat duplex will be apparent from the secondary structure of the sgRNA. It may be typically a first complimentary stretch after (in 5′ to 3′ direction) the poly U tract and before the tetraloop; and a second complimentary stretch after (in 5′ to 3′ direction) the tetraloop and before the poly A tract. The first complimentary stretch (the “repeat”) is complimentary to the second complimentary stretch (the “anti-repeat”). As such, they Watson-Crick base pair to form a duplex of dsRNA when folded back on one another. As such, the anti-repeat sequence is the complimentary sequence of the repeat and in terms to A-U or C-G base pairing, but also in terms of the fact that the anti-repeat is in the reverse orientation due to the tetraloop.

[0265] In an embodiment of the invention, modification of guide architecture comprises replacing bases in stemloop 2. For example, in some embodiments, “actt” (“acuu” in RNA) and “aagt” (“aagu” in RNA) bases in stemloop2 are replaced with “cgcc” and “gcgg”. In some embodiments, “actt” and “aagt” bases in stemloop 2 are replaced with complimentary GC-rich regions of 4 nucleotides. In some embodiments, the complimentary GC-rich regions of 4 nucleotides are “cgcc” and “gcgg” (both in 5′ to 3′ direction). In some embodiments, the complimentary GC-rich regions of 4 nucleotides are “gcgg” and “cgcc” (both in 5′ to 3′ direction). Other combination of C and G in the complimentary GC-rich regions of 4 nucleotides will be apparent including CCCC and GGGG.

[0266] In one embodiment, the stemloop 2, e.g., “ACTTgtttAAGT” (SEQ ID NO: 12006) can be replaced by any “XXXXgtttYYYY” (SEQ ID NO: 12007), e.g., where XXXX and YYYY represent any complementary sets of nucleotides that together will base pair to each other to create a stem.

[0267] In one embodiment, the stem comprises at least about 4 bp comprising complementary X and Y sequences, although stems of more, e.g., 5, 6, 7, 8, 9, 10, 11 or 12 or fewer, e.g., 3, 2, base pairs are also contemplated. Thus, for example X2-12 and Y2-12 (wherein X and Y represent any complementary set of nucleotides) may be contemplated. In one embodiment, the stem made of the X and Y nucleotides, together with the “gttt,” will form a complete hairpin in the overall secondary structure; and this may be advantageous and the amount of base pairs can be any amount that forms a complete hairpin. In one embodiment, any complementary X:Y base-pairing sequence (e.g., as to length) is tolerated, so long as the secondary structure of the entire sgRNA is preserved. In one embodiment, the stem can be a form of X:Y base-pairing that does not disrupt the secondary structure of the whole sgRNA in that it has a DR:tracr duplex, and 3 stemloops. In one embodiment, the “gttt” tetraloop that connects ACTT and AAGT (or any alternative stem made of X:Y base pairs) can be any sequence of the same length (e.g., 4 base pair) or longer that does not interrupt the overall secondary structure of the sgRNA. In one embodiment, the stemloop can be something that further lengthens stemloop2, e.g., can be MS2 aptamer. In one embodiment, the stemloop3 “GGCACCGagtCGGTGC” (SEQ ID NO: 12008) can likewise take on a “XXXXXXXagtYYYYYYY” (SEQ ID NO: 12009) form, e.g., wherein X7 and Y7 represent any complementary sets of nucleotides that together will base pair to each other to create a stem. In one embodiment, the stem comprises about 7 bp comprising complementary X and Y sequences, although stems of more or fewer base pairs are also contemplated. In one embodiment, the stem made of the X and Y nucleotides, together with the “agt”, will form a complete hairpin in the overall secondary structure. In one embodiment, any complementary X:Y base pairing sequence is tolerated, so long as the secondary structure of the entire sgRNA is preserved. In one embodiment, the stem can be a form of X:Y basepairing that doesn't disrupt the secondary structure of the whole sgRNA in that it has a DR:tracr duplex, and 3 stemloops. In one embodiment, the “agt” sequence of the stemloop 3 can be extended or be replaced by an aptamer, e.g., a MS2 aptamer or sequence that otherwise generally preserves the architecture of stemloop3. In one embodiment for alternative Stemloops 2 and/or 3, each X and Y pair can refer to any base pair. In one embodiment, non-Watson Crick base pairing is contemplated, where such pairing otherwise generally preserves the architecture of the stemloop at that position.

[0268] In one embodiment, the DR:tracrRNA duplex can be replaced with the form: gYYYYag(N)NNNNxxxxNNNN(AAN)uuRRRRu (SEQ ID NO: 12010) (using standard IUPAC nomenclature for nucleotides), wherein (N) and (AAN) represent part of the bulge in the duplex, and “xxxx” represents a linker sequence. NNNN on the direct repeat can be anything so long as it base-pairs with the corresponding NNNN portion of the tracrRNA. In one embodiment, the DR:tracrRNA duplex can be connected by a linker of any length (xxxx . . . ), any base composition, as long as it doesn't alter the overall structure.

[0269] In one embodiment, the sgRNA structural requirement is to have a duplex and 3 stemloops. In most embodiments, the actual sequence requirement for many of the particular base requirements are lax, in that the architecture of the DR:tracrRNA duplex should be preserved, but the sequence that creates the architecture, i.e., the stems, loops, bulges, etc., may be altered.

### Aptamers

[0270] One guide with a first aptamer/RNA-binding protein pair can be linked or fused to an activator, whilst a second guide with a second aptamer/RNA-binding protein pair can be linked or fused to a repressor. The guides are for different targets (loci), so this allows one gene to be activated and one repressed. For example, the following schematic shows such an approach:

[chemical structure]

[0271] The present invention also relates to orthogonal PP7/MS2 gene targeting. In this example, sgRNA targeting different loci are modified with distinct RNA loops in order to recruit MS2-VP64 or PP7-SID4X, which activate and repress their target loci, respectively. PP7 is the RNA-binding coat protein of the bacteriophage Pseudomonas. Like MS2, it binds a specific RNA sequence and secondary structure. The PP7 RNA-recognition motif is distinct from that of MS2. Consequently, PP7 and MS2 can be multiplexed to mediate distinct effects at different genomic loci simultaneously. For example, an sgRNA targeting locus A can be modified with MS2 loops, recruiting MS2-VP64 activators, while another sgRNA targeting locus B can be modified with PP7 loops, recruiting PP7-SID4X repressor domains. In the same cell, dCas9 can thus mediate orthogonal, locus-specific modifications. This principle can be extended to incorporate other orthogonal RNA-binding proteins such as Q-beta.

[0272] An alternative option for orthogonal repression includes incorporating non-coding RNA loops with transactive repressive function into the guide (either at similar positions to the MS2/PP7 loops integrated into the guide or at the 3′ terminus of the guide). For instance, guides were designed with non-coding (but known to be repressive) RNA loops (e.g., using the Alu repressor (in RNA) that interferes with RNA polymerase II in manmialian cells). The Alu RNA sequence was located: in place of the MS2 RNA sequences as used herein (e.g., at tetraloop and/or stem loop 2); and/or at 3′ terminus of the guide. This gives possible combinations of MS2, PP7 or Alu at the tetraloop and/or stemloop 2 positions, as well as, optionally, addition of Alu at the 3′ end of the guide (with or without a linker).

[0273] The use of two different aptamers (distinct RNA) allows an activator-adaptor protein fusion and a repressor-adaptor protein fusion to be used, with different guides, to activate expression of one gene, whilst repressing another. They, along with their different guides can be administered together, or substantially together, in a multiplexed approach. A large number of such modified guides can be used all at the same time, for example 10 or 20 or 30 and so forth, whilst only one (or at least a minimal number) of Cas9s to be delivered, as a comparatively small number of Cas9s can be used with a large number of modified guides. The adaptor protein may be associated (preferably linked or fused to) one or more activators or one or more repressors. For example, the adaptor protein may be associated with a first activator and a second activator. The first and second activators may be the same, but they are preferably different activators. For example, one might be VP64, whilst the other might be p65, although these are just examples and other transcriptional activators are envisaged. Three or more or even four or more activators (or repressors) may be used, but package size may limit the number being higher than 5 different functional domains. Linkers are preferably used, over a direct fusion to the adaptor protein, where two or more functional domains are associated with the adaptor protein. Suitable linkers might include the GlySer linker.

[0274] It is also envisaged that the enzyme-guide complex as a whole may be associated with two or more functional domains. For example, there may be two or more functional domains associated with the enzyme, or there may be two or more functional domains associated with the guide (via one or more adaptor proteins), or there may be one or more functional domains associated with the enzyme and one or more functional domains associated with the guide (via one or more adaptor proteins).

[0275] The fusion between the adaptor protein and the activator or repressor may include a linker. For example, GlySer linkers GGGS can be used. They can be used in repeats of 3 ((GGGGS)₃(SEQ ID NO: 12011)) or 6, 9 or even 12 or more, to provide suitable lengths, as required. Linkers can be used between the RNA-binding protein and the functional domain (activator or repressor), or between the CRISPR Enzyme (Cas9) and the functional domain (activator or repressor). The linkers the user to engineer appropriate amounts of “mechanical flexibility”.

### Dead Guides

[0276] In one embodiment, the invention provides guide sequences which are modified in a manner which allows for formation of the CRISPR complex and successful binding to the target, while at the same time, not allowing for successful nuclease activity (i.e., without nuclease activity/without indel activity). For matters of explanation such modified guide sequences are referred to as “dead guides” or “dead guide sequences”. These dead guides or dead guide sequences can be thought of as catalytically inactive or conformationally inactive with regard to nuclease activity. Nuclease activity may be measured using surveyor analysis or deep sequencing as commonly used in the art, preferably surveyor analysis. Similarly, dead guide sequences may not sufficiently engage in productive base pairing with respect to the ability to promote catalytic activity or to distinguish on-target and off-target binding activity. Briefly, the surveyor assay involves purifying and amplifying a CRISPR target site for a gene and forming heteroduplexes with primers amplifying the CRISPR target site. After re-anneal, the products are treated with SURVEYOR nuclease and SURVEYOR enhancer S (Transgenomics) following the manufacturer's recommended protocols, analyzed on gels, and quantified based upon relative band intensities.

[0277] Hence, in a related embodiment, the invention provides a non-naturally occurring or engineered composition Cas9 CRISPR-Cas system comprising a functional Cas9 as described herein, and guide RNA (gRNA) wherein the gRNA comprises a dead guide sequence whereby the gRNA is capable of hybridizing to a target sequence such that the Cas9 CRISPR-Cas system is directed to a genomic locus of interest in a cell without detectable indel activity resultant from nuclease activity of a non-mutant Cas9 enzyme of the system as detected by a SURVEYOR assay. For shorthand purposes, a gRNA comprising a dead guide sequence whereby the gRNA is capable of hybridizing to a target sequence such that the Cas9 CRISPR-Cas system is directed to a genomic locus of interest in a cell without detectable indel activity resultant from nuclease activity of a non-mutant Cas9 enzyme of the system as detected by a SURVEYOR assay is herein termed a “dead gRNA”. It is to be understood that any of the gRNAs according to the invention as described herein elsewhere may be used as dead gRNAs/gRNAs comprising a dead guide sequence as described herein below. Any of the methods, products, compositions and uses as described herein elsewhere is equally applicable with the dead gRNAs/gRNAs comprising a dead guide sequence as further detailed below. By means of further guidance, the following particular embodiments and embodiments are provided. The ability of a dead guide sequence to direct sequence-specific binding of a CRISPR complex to a target sequence may be assessed by any suitable assay. For example, the components of a CRISPR system sufficient to form a CRISPR complex, including the dead guide sequence to be tested, may be provided to a host cell having the corresponding target sequence, such as by transfection with vectors encoding the components of the CRISPR sequence, followed by an assessment of preferential cleavage within the target sequence, such as by Surveyor assay as described herein. Similarly, cleavage of a target polynucleotide sequence may be evaluated in a test tube by providing the target sequence, components of a CRISPR complex, including the dead guide sequence to be tested and a control guide sequence different from the test dead guide sequence, and comparing binding or rate of cleavage at the target sequence between the test and control guide sequence reactions. Other assays are possible, and will occur to those skilled in the art. A dead guide sequence may be selected to target any target sequence. In some embodiments, the target sequence is a sequence within a genome of a cell.

[0278] As explained further herein, several structural parameters allow for a proper framework to arrive at such dead guides. Dead guide sequences are shorter than respective guide sequences which result in active Cas9-specific indel formation. Dead guides are 5%, 10%, 20%, 30%, 40%, 50%, shorter than respective guides directed to the same Cas9 leading to active Cas9-specific indel formation.

[0279] As explained below and known in the art, one embodiment of gRNA-Cas9 specificity is the direct repeat sequence, which is to be appropriately linked to such guides. In particular, this implies that the direct repeat sequences are designed dependent on the origin of the Cas9. Thus, structural data available for validated dead guide sequences may be used for designing Cas9 specific equivalents. Structural similarity between, e.g., the orthologous nuclease domains RuvC of two or more Cas9 effector proteins may be used to transfer design equivalent dead guides. Thus, the dead guide herein may be appropriately modified in length and sequence to reflect such Cas9 specific equivalents, allowing for formation of the CRISPR complex and successful binding to the target, while at the same time, not allowing for successful nuclease activity.

[0280] The use of dead guides in the context herein as well as the state of the art provides a surprising and unexpected platform for network biology and/or systems biology in both in vitro, ex vivo, and in vivo applications, allowing for multiplex gene targeting, and in particular bidirectional multiplex gene targeting. Prior to the use of dead guides, addressing multiple targets, for example for activation, repression and/or silencing of gene activity, has been challenging and in some cases not possible. With the use of dead guides, multiple targets, and thus multiple activities, may be addressed, for example, in the same cell, in the same animal, or in the same patient. Such multiplexing may occur at the same time or staggered for a desired timeframe.

[0281] For example, the dead guides now allow for the first time to use gRNA as a means for gene targeting, without the consequence of nuclease activity, while at the same time providing directed means for activation or repression. Guide RNA comprising a dead guide may be modified to further include elements in a manner which allow for activation or repression of gene activity, in particular protein adaptors (e.g., aptamers) as described herein elsewhere allowing for functional placement of gene effectors (e.g., activators or repressors of gene activity). One example is the incorporation of aptamers, as explained herein and in the state of the art. By engineering the gRNA comprising a dead guide to incorporate protein-interacting aptamers (Konermann et al., “Genome-scale transcription activation by an engineered CRISPR-Cas9 complex,” doi:10.1038/naturel4136, incorporated herein by reference), one may assemble a synthetic transcription activation complex consisting of multiple distinct effector domains. Such may be modeled after natural transcription activation processes. For example, an aptamer, which selectively binds an effector (e.g., an activator or repressor; dimerized MS2 bacteriophage coat proteins as fusion proteins with an activator or repressor), or a protein which itself binds an effector (e.g., activator or repressor) may be appended to a dead gRNA tetraloop and/or a stem-loop 2. In the case of MS2, the fusion protein MS2-VP64 binds to the tetraloop and/or stem-loop 2 and in turn mediates transcriptional up-regulation, for example for Neurog2. Other transcriptional activators are, for example, VP64. P65, HSF1, and MyoD1. By mere example of this concept, replacement of the MS2 stem-loops with PP7-interacting stem-loops may be used to recruit repressive elements.

[0282] Thus, one embodiment is a gRNA of the invention which comprises a dead guide, wherein the gRNA further comprises modifications which provide for gene activation or repression, as described herein. The dead gRNA may comprise one or more aptamers. The aptamers may be specific to gene effectors, gene activators or gene repressors. Alternatively, the aptamers may be specific to a protein which in turn is specific to and recruits/binds a specific gene effector, gene activator or gene repressor. If there are multiple sites for activator or repressor recruitment, it is preferred that the sites are specific to either activators or repressors. If there are multiple sites for activator or repressor binding, the sites may be specific to the same activators or same repressors. The sites may also be specific to different activators or different repressors. The gene effectors, gene activators, gene repressors may be present in the form of fusion proteins.

[0283] In an embodiment, the dead gRNA as described herein or the Cas9 CRISPR-Cas complex as described herein includes a non-naturally occurring or engineered composition comprising two or more adaptor proteins, wherein each protein is associated with one or more functional domains and wherein the adaptor protein binds to the distinct RNA sequence(s) inserted into the at least one loop of the dead gRNA. Hence, an embodiment provides a non-naturally occurring or engineered composition comprising a guide RNA (gRNA) comprising a dead guide sequence capable of hybridizing to a target sequence in a genomic locus of interest in a cell, wherein the dead guide sequence is as defined herein, a Cas9 comprising at least one or more nuclear localization sequences, wherein the Cas9 optionally comprises at least one mutation wherein at least one loop of the dead gRNA is modified by the insertion of distinct RNA sequence(s) that bind to one or more adaptor proteins, and wherein the adaptor protein is associated with one or more functional domains; or, wherein the dead gRNA is modified to have at least one non-coding functional loop, and wherein the composition comprises two or more adaptor proteins, wherein the each protein is associated with one or more functional domains.

[0284] In certain embodiments, the adaptor protein is a fusion protein comprising the functional domain, the fusion protein optionally comprising a linker between the adaptor protein and the functional domain, the linker optionally including a GlySer linker.

[0285] In certain embodiments, the at least one loop of the dead gRNA is not modified by the insertion of distinct RNA sequence(s) that bind to the two or more adaptor proteins.

[0286] In certain embodiments, the one or more functional domains associated with the adaptor protein is a transcriptional activation domain.

[0287] In certain embodiments, the one or more functional domains associated with the adaptor protein is a transcriptional activation domain comprising VP64, p65, MyoDI, HSF1, RTA or SET7/9.

[0288] In certain embodiments, the one or more functional domains associated with the adaptor protein is a transcriptional repressor domain.

[0289] In certain embodiments, the transcriptional repressor domain is a KRAB domain.

[0290] In certain embodiments, the transcriptional repressor domain is a NuE domain, NcoR domain, SID domain or a SID4X domain.

[0291] In certain embodiments, at least one of the one or more functional domains associated with the adaptor protein have one or more activities comprising methylase activity, demethylase activity, transcription activation activity, transcription repression activity, transcription release factor activity, histone modification activity, DNA integration activity RNA cleavage activity, DNA cleavage activity or nucleic acid binding activity.

[0292] In certain embodiments, the DNA cleavage activity is due to a Foki nuclease.

[0293] In certain embodiments, the dead gRNA is modified so that, after dead gRNA binds the adaptor protein and further binds to the Cas9 and target, the functional domain is in a spatial orientation allowing for the functional domain to function in its attributed function.

[0294] In certain embodiments, the at least one loop of the dead gRNA is tetra loop and/or loop2. In certain embodiments, the tetra loop and loop 2 of the dead gRNA are modified by the insertion of the distinct RNA sequence(s).

[0295] In certain embodiments, the insertion of distinct RNA sequence(s) that bind to one or more adaptor proteins is an aptamer sequence. In certain embodiments, the aptamer sequence is two or more aptamer sequences specific to the same adaptor protein. In certain embodiments, the aptamer sequence is two or more aptamer sequences specific to different adaptor protein.

[0296] In certain embodiments, the adaptor protein comprises MS2, PP7, Qβ, F2, GA, fr, JP501, M12, R17, BZ13, JP34, JP500, KU1, M11, MX1, TW18, VK, SP, FT, 1D2, NL95, TW19, AP205, φCb5, φCb8r, φCb12r, φCb23r, 7s, PRR1.

[0297] In certain embodiments, the cell is a eukaryotic cell. In certain embodiments, the eukaryotic cell is a mammalian cell, optionally a mouse cell. In certain embodiments, the mammalian cell is a human cell.

[0298] In certain embodiments, a first adaptor protein is associated with a p65 domain and a second adaptor protein is associated with a HSF1 domain.

[0299] In certain embodiments, the composition comprises a Cas9 CRISPR-Cas complex having at least three functional domains, at least one of which is associated with the Cas9 and at least two of which are associated with dead gRNA.

[0300] In certain embodiments, the composition further comprises a second gRNA, wherein the second gRNA is a live gRNA capable of hybridizing to a second target sequence such that a second Cas9 CRISPR-Cas system is directed to a second genomic locus of interest in a cell with detectable indel activity at the second genomic locus resultant from nuclease activity of the Cas9 enzyme of the system.

[0301] In certain embodiments, the composition further comprises a plurality of dead gRNAs and/or a plurality of live gRNAs.

[0302] One embodiment of the invention is to take advantage of the modularity and customizability of the gRNA scaffold to establish a series of gRNA scaffolds with different binding sites (in particular aptamers) for recruiting distinct types of effectors in an orthogonal manner. Again, for matters of example and illustration of the broader concept, replacement of the MS2 stem-loops with PP7-interacting stem-loops may be used to bind/recruit repressive elements, enabling multiplexed bidirectional transcriptional control. Thus, in general, gRNA comprising a dead guide may be employed to provide for multiplex transcriptional control and preferred bidirectional transcriptional control. This transcriptional control is most preferred of genes. For example, one or more gRNA comprising dead guide(s) may be employed in targeting the activation of one or more target genes. At the same time, one or more gRNA comprising dead guide(s) may be employed in targeting the repression of one or more target genes. Such a sequence may be applied in a variety of different combinations, for example the target genes are first repressed and then at an appropriate period other targets are activated, or select genes are repressed at the same time as select genes are activated, followed by further activation and/or repression. As a result, multiple components of one or more biological systems may advantageously be addressed together.

[0303] In an embodiment, the invention provides nucleic acid molecule(s) encoding dead gRNA or the Cas9 CRISPR-Cas complex or the composition as described herein.

[0304] In an embodiment, the invention provides a vector system comprising: a nucleic acid molecule encoding dead guide RNA as defined herein. In certain embodiments, the vector system further comprises a nucleic acid molecule(s) encoding Cas9. In certain embodiments, the vector system further comprises a nucleic acid molecule(s) encoding (live) gRNA. In certain embodiments, the nucleic acid molecule or the vector further comprises regulatory element(s) operable in a eukaryotic cell operably linked to the nucleic acid molecule encoding the guide sequence (gRNA) and/or the nucleic acid molecule encoding Cas9 and/or the optional nuclear localization sequence(s).

[0305] In another embodiment, structural analysis may also be used to study interactions between the dead guide and the active Cas9 nuclease that enable DNA binding, but no DNA cutting. In this way amino acids important for nuclease activity of Cas9 are determined. Modification of such amino acids allows for improved Cas9 enzymes used for gene editing.

[0306] A further embodiment is combining the use of dead guides as explained herein with other applications of CRISPR, as explained herein as well as known in the art. For example, gRNA comprising dead guide(s) for targeted multiplex gene activation or repression or targeted multiplex bidirectional gene activation/repression may be combined with gRNA comprising guides which maintain nuclease activity, as explained herein. Such gRNA comprising guides which maintain nuclease activity may or may not further include modifications which allow for repression of gene activity (e.g., aptamers). Such gRNA comprising guides which maintain nuclease activity may or may not further include modifications which allow for activation of gene activity (e.g., aptamers). In such a manner, a further means for multiplex gene control is introduced (e.g., multiplex gene targeted activation without nuclease activity/without indel activity may be provided at the same time or in combination with gene targeted repression with nuclease activity).

[0307] For example, 1) using one or more gRNA (e.g. 1-50, 1-40, 1-30, 1-20, preferably 1-10, more preferably 1-5) comprising dead guide(s) targeted to one or more genes and further modified with appropriate aptamers for the recruitment of gene activators; 2) may be combined with one or more gRNA (e.g., 1-50, 1-40, 1-30, 1-20, preferably 1-10, more preferably 1-5) comprising dead guide(s) targeted to one or more genes and further modified with appropriate aptamers for the recruitment of gene repressors. 1) and/or 2) may then be combined with 3) one or more gRNA (e.g., 1-50, 1-40, 1-30, 1-20, preferably 1-10, more preferably 1-5) targeted to one or more genes. This combination can then be carried out in turn with 1)+2)+3) with 4) one or more gRNA (e.g., 1-50, 1-40, 1-30, 1-20, preferably 1-10, more preferably 1-5) targeted to one or more genes and further modified with appropriate aptamers for the recruitment of gene activators. This combination can then be carried in turn with 1)+2)+3)+4) with 5) one or more gRNA (e.g., 1-50, 1-40, 1-30, 1-20, preferably 1-10, more preferably 1-5) targeted to one or more genes and further modified with appropriate aptamers for the recruitment of gene repressors. As a result, various uses and combinations are included in the invention. For example, combination 1)+2); combination 1)+3); combination 2)+3); combination 1)+2)+3); combination 1)+2)+3)+4); combination 1)+3)+4); combination 2)+3)+4); combination 1)+2)+4); combination 1)+2)+3)+4)+5); combination 1)+3)+4)+5); combination 2)+3)+4)+5); combination 1)+2)+4)+5); combination 1)+2)+3)+5); combination 1)+3)+5); combination 2)+3)+5); combination 1)+2)+5).

[0308] In an embodiment, the invention provides an algorithm for designing, evaluating, or selecting a dead guide RNA targeting sequence (dead guide sequence) for guiding a Cas9 CRISPR-Cas system to a target gene locus. In particular, it has been determined that dead guide RNA specificity relates to and can be optimized by varying i) GC content and ii) targeting sequence length. In an embodiment, the invention provides an algorithm for designing or evaluating a dead guide RNA targeting sequence that minimizes off-target binding or interaction of the dead guide RNA. In an embodiment of the invention, the algorithm for selecting a dead guide RNA targeting sequence for directing a CRISPR system to a gene locus in an organism comprises a) locating one or more CRISPR motifs in the gene locus, analyzing the 20 nucleotide (nt) sequence downstream of each CRISPR motif by i) determining the GC content of the sequence; and ii) determining whether there are off-target matches of the 15 downstream nucleotides nearest to the CRISPR motif in the genome of the organism, and c) selecting the 15 nucleotide sequence for use in a dead guide RNA if the GC content of the sequence is 70% or less and no off-target matches are identified. In an embodiment, the sequence is selected for a targeting sequence if the GC content is 60% or less. In certain embodiments, the sequence is selected for a targeting sequence if the GC content is 55% or less, 50% or less, 45% or less, 40% or less, 35% or less or 30% or less. In an embodiment, two or more sequences of the gene locus are analyzed and the sequence having the lowest GC content, or the next lowest GC content, or the next lowest GC content is selected. In an embodiment, the sequence is selected for a targeting sequence if no off-target matches are identified in the genome of the organism. In an embodiment, the targeting sequence is selected if no off-target matches are identified in regulatory sequences of the genome.

[0309] In an embodiment, the invention provides a method of selecting a dead guide RNA targeting sequence for directing a functionalized CRISPR system to a gene locus in an organism, which comprises: a) locating one or more CRISPR motifs in the gene locus; b) analyzing the 20 nt sequence downstream of each CRISPR motif by: i) determining the GC content of the sequence; and ii) determining whether there are off-target matches of the first 15 nt of the sequence in the genome of the organism; c) selecting the sequence for use in a guide RNA if the GC content of the sequence is 70% or less and no off-target matches are identified. In an embodiment, the sequence is selected if the GC content is 50% or less. In an embodiment, the sequence is selected if the GC content is 40% or less. In an embodiment, the sequence is selected if the GC content is 30% or less. In an embodiment, two or more sequences are analyzed and the sequence having the lowest GC content is selected. In an embodiment, off-target matches are determined in regulatory sequences of the organism. In an embodiment, the gene locus is a regulatory region. An embodiment provides a dead guide RNA comprising the targeting sequence selected according to the aforementioned methods.

[0310] In an embodiment, the invention provides a dead guide RNA for targeting a functionalized CRISPR system to a gene locus in an organism. In an embodiment of the invention, the dead guide RNA comprises a targeting sequence wherein the CG content of the target sequence is 70% or less, and the first 15 nt of the targeting sequence does not match an off-target sequence downstream from a CRISPR motif in the regulatory sequence of another gene locus in the organism. In certain embodiments, the GC content of the targeting sequence 60% or less, 55% or less, 50% or less, 45% or less, 40% or less, 35% or less or 30% or less. In certain embodiments, the GC content of the targeting sequence is from 70% to 60% or from 60% to 50% or from 50% to 40% or from 40% to 30%. In an embodiment, the targeting sequence has the lowest CG content among potential targeting sequences of the locus.

[0311] In an embodiment of the invention, the first 15 nt of the dead guide match the target sequence. In another embodiment, first 14 nt of the dead guide match the target sequence. In another embodiment, the first 13 nt of the dead guide match the target sequence. In another embodiment first 12 nt of the dead guide match the target sequence. In another embodiment, first 11 nt of the dead guide match the target sequence. In another embodiment, the first 10 nt of the dead guide match the target sequence. In an embodiment of the invention the first 15 nt of the dead guide does not match an off-target sequence downstream from a CRISPR motif in the regulatory region of another gene locus. In other embodiments, the first 14 nt, or the first 13 nt of the dead guide, or the first 12 nt of the guide, or the first 11 nt of the dead guide, or the first 10 nt of the dead guide, does not match an off-target sequence downstream from a CRISPR motif in the regulatory region of another gene locus. In other embodiments, the first 15 nt, or 14 nt, or 13 nt, or 12 nt, or 11 nt of the dead guide do not match an off-target sequence downstream from a CRISPR motif in the genome.

[0312] In certain embodiments, the dead guide RNA includes additional nucleotides at the 3′-end that do not match the target sequence. Thus, a dead guide RNA that includes the first 15 nt, or 14 nt, or 13 nt, or 12 nt, or 11 nt downstream of a CRISPR motif can be extended in length at the 3′ end to 12 nt, 13 nt, 14 nt, 15 nt, 16 nt, 17 nt, 18 nt. 19 nt, 20 nt, or longer.

[0313] The invention provides a method for directing a Cas9 CRISPR-Cas system, including but not limited to a dead Cas9 (dCas9) or functionalized Cas9 system (which may comprise a functionalized Cas9 or functionalized guide) to a gene locus. In an embodiment, the invention provides a method for selecting a dead guide RNA targeting sequence and directing a functionalized CRISPR system to a gene locus in an organism. In an embodiment, the invention provides a method for selecting a dead guide RNA targeting sequence and effecting gene regulation of a target gene locus by a functionalized Cas9 CRISPR-Cas system. In certain embodiments, the method is used to effect target gene regulation while minimizing off-target effects. In an embodiment, the invention provides a method for selecting two or more dead guide RNA targeting sequences and effecting gene regulation of two or more target gene loci by a functionalized Cas9 CRISPR-Cas system. In certain embodiments, the method is used to effect regulation of two or more target gene loci while minimizing off-target effects.

[0314] In an embodiment, the invention provides a method of selecting a dead guide RNA targeting sequence for directing a functionalized Cas9 to a gene locus in an organism, which comprises: a) locating one or more CRISPR motifs in the gene locus; b) analyzing the sequence downstream of each CRISPR motif by: i) selecting 10 to 15 nt adjacent to the CRISPR motif, ii) determining the GC content of the sequence; and c) selecting the 10 to 15 nt sequence as a targeting sequence for use in a guide RNA if the GC content of the sequence is 40% or more. In an embodiment, the sequence is selected if the GC content is 50% or more. In an embodiment, the sequence is selected if the GC content is 60% or more. In an embodiment, the sequence is selected if the GC content is 70% or more. In an embodiment, two or more sequences are analyzed and the sequence having the highest GC content is selected. In an embodiment, the method further comprises adding nucleotides to the 3′ end of the selected sequence which do not match the sequence downstream of the CRISPR motif. An embodiment provides a dead guide RNA comprising the targeting sequence selected according to the aforementioned methods.

[0315] In an embodiment, the invention provides a dead guide RNA for directing a functionalized CRISPR system to a gene locus in an organism wherein the targeting sequence of the dead guide RNA consists of 10 to 15 nucleotides adjacent to the CRISPR motif of the gene locus, wherein the CG content of the target sequence is 50% or more. In certain embodiments, the dead guide RNA further comprises nucleotides added to the 3′ end of the targeting sequence which do not match the sequence downstream of the CRISPR motif of the gene locus.

[0316] In an embodiment, the invention provides for a single effector to be directed to one or more, or two or more gene loci. In certain embodiments, the effector is associated with a Cas9, and one or more, or two or more selected dead guide RNAs are used to direct the Cas9-associated effector to one or more, or two or more selected target gene loci. In certain embodiments, the effector is associated with one or more, or two or more selected dead guide RNAs, each selected dead guide RNA, when complexed with a Cas9 enzyme, causing its associated effector to localize to the dead guide RNA target. One non-limiting example of such CRISPR systems modulates activity of one or more, or two or more gene loci subject to regulation by the same transcription factor.

[0317] In an embodiment, the invention provides for two or more effectors to be directed to one or more gene loci. In certain embodiments, two or more dead guide RNAs are employed, each of the two or more effectors being associated with a selected dead guide RNA, with each of the two or more effectors being localized to the selected target of its dead guide RNA. One non-limiting example of such CRISPR systems modulates activity of one or more, or two or more gene loci subject to regulation by different transcription factors. Thus, in one non-limiting embodiment, two or more transcription factors are localized to different regulatory sequences of a single gene. In another non-limiting embodiment, two or more transcription factors are localized to different regulatory sequences of different genes. In certain embodiments, one transcription factor is an activator. In certain embodiments, one transcription factor is an inhibitor. In certain embodiments, one transcription factor is an activator and another transcription factor is an inhibitor. In certain embodiments, gene loci expressing different components of the same regulatory pathway are regulated. In certain embodiments, gene loci expressing components of different regulatory pathways are regulated.

[0318] In an embodiment, the invention also provides a method and algorithm for designing and selecting dead guide RNAs that are specific for target DNA cleavage or target binding and gene regulation mediated by an active Cas9 CRISPR-Cas system. In certain embodiments, the Cas9 CRISPR-Cas system provides orthogonal gene control using an active Cas9 which cleaves target DNA at one gene locus while at the same time binds to and promotes regulation of another gene locus.

[0319] In an embodiment, the invention provides an method of selecting a dead guide RNA targeting sequence for directing a functionalized Cas9 to a gene locus in an organism, without cleavage, which comprises a) locating one or more CRISPR motifs in the gene locus; b) analyzing the sequence downstream of each CRISPR motif by i) selecting 10 to 15 nt adjacent to the CRISPR motif, ii) determining the GC content of the sequence, and c) selecting the 10 to 15 nt sequence as a targeting sequence for use in a dead guide RNA if the GC content of the sequence is 30% more, 40% or more. In certain embodiments, the GC content of the targeting sequence is 35% or more, 40% or more, 45% or more, 50% or more, 55% or more, 60% or more, 65% or more, or 70% or more. In certain embodiments, the GC content of the targeting sequence is from 30% to 40% or from 40% to 50% or from 50% to 60% or from 60% to 70%. In an embodiment of the invention, two or more sequences in a gene locus are analyzed and the sequence having the highest GC content is selected.

[0320] In an embodiment of the invention, the portion of the targeting sequence in which GC content is evaluated is 10 to 15 contiguous nucleotides of the 15 target nucleotides nearest to the PAM. In an embodiment of the invention, the portion of the guide in which GC content is considered is the 10 to 11 nucleotides or 11 to 12 nucleotides or 12 to 13 nucleotides or 13, or 14, or 15 contiguous nucleotides of the 15 nucleotides nearest to the PAM.

[0321] In an embodiment, the invention further provides an algorithm for identifying dead guide RNAs which promote CRISPR system gene locus cleavage while avoiding functional activation or inhibition. It is observed that increased GC content in dead guide RNAs of 16 to 20 nucleotides coincides with increased DNA cleavage and reduced functional activation.

[0322] In some embodiments, the efficiency of functionalized Cas9 can be increased by addition of nucleotides to the 3′ end of a guide RNA which do not match a target sequence downstream of the CRISPR motif. For example, of dead guide RNA 11 to 15 nt in length, shorter guides may be less likely to promote target cleavage but are also less efficient at promoting CRISPR system binding and functional control. In certain embodiments, addition of nucleotides that don't match the target sequence to the 3′ end of the dead guide RNA increase activation efficiency while not increasing undesired target cleavage. In an embodiment, the invention also provides a method and algorithm for identifying improved dead guide RNAs that effectively promote CRISPRP system function in DNA binding and gene regulation while not promoting DNA cleavage. Thus, in certain embodiments, the invention provides a dead guide RNA that includes the first 15 nt, or 14 nt, or 13 nt, or 12 nt, or 11 nt downstream of a CRISPR motif and is extended in length at the 3′ end by nucleotides that mismatch the target to 12 nt, 13 nt, 14 nt, 15 nt, 16 nt, 17 nt, 18 nt, 19 nt, 20 nt, or longer.

[0323] In an embodiment, the invention provides a method for effecting selective orthogonal gene control. As will be appreciated from the disclosure herein, dead guide selection according to the invention, taking into account guide length and GC content, provides effective and selective transcription control by a functional Cas9 CRISPR-Cas system, for example to regulate transcription of a gene locus by activation or inhibition and minimize off-target effects. Accordingly, by providing effective regulation of individual target loci, the invention also provides effective orthogonal regulation of two or more target loci.

[0324] In certain embodiments, orthogonal gene control is by activation or inhibition of two or more target loci. In certain embodiments, orthogonal gene control is by activation or inhibition of one or more target locus and cleavage of one or more target locus.

[0325] In one embodiment, the invention provides a cell comprising a non-naturally occurring Cas9 CRISPR-Cas system comprising one or more dead guide RNAs disclosed or made according to a method or algorithm described herein wherein the expression of one or more gene products has been altered. In an embodiment of the invention, the expression in the cell of two or more gene products has been altered. The invention also provides a cell line from such a cell.

[0326] In one embodiment, the invention provides a multicellular organism comprising one or more cells comprising a non-naturally occurring Cas9 CRISPR-Cas system comprising one or more dead guide RNAs disclosed or made according to a method or algorithm described herein. In one embodiment, the invention provides a product from a cell, cell line, or multicellular organism comprising a non-naturally occurring Cas9 CRISPR-Cas system comprising one or more dead guide RNAs disclosed or made according to a method or algorithm described herein.

[0327] A further embodiment of this invention is the use of gRNA comprising dead guide(s) as described herein, optionally in combination with gRNA comprising guide(s) as described herein or in the state of the art, in combination with systems e.g., cells, transgenic animals, transgenic mice, inducible transgenic animals, inducible transgenic mice) which are engineered for either overexpression of Cas9 or preferably knock in Cas9. As a result, a single system (e.g., transgenic animal, cell) can serve as a basis for multiplex gene modifications in systems/network biology. On account of the dead guides, this is now possible in both in vitro, ex vivo, and in vivo.

[0328] For example, once the Cas9 is provided for, one or more dead gRNAs may be provided to direct multiplex gene regulation, and preferably multiplex bidirectional gene regulation. The one or more dead gRNAs may be provided in a spatially and temporally appropriate manner if necessary or desired (for example tissue specific induction of Cas9 expression). On account that the transgenic/inducible Cas9 is provided for (e.g., expressed) in the cell, tissue, animal of interest, both gRNAs comprising dead guides or gRNAs comprising guides are equally effective. In the same manner, a further embodiment of this invention is the use of gRNA comprising dead guide(s) as described herein, optionally in combination with gRNA comprising guide(s) as described herein or in the state of the art, in combination with systems (e.g., cells, transgenic animals, transgenic mice, inducible transgenic animals, inducible transgenic mice) which are engineered for knockout Cas9 CRISPR-Cas.

[0329] As a result, the combination of dead guides as described herein with CRISPR applications described herein and CRISPR applications known in the art results in a highly efficient and accurate means for multiplex screening of systems (e.g., network biology). Such screening allows, for example, identification of specific combinations of gene activities for identifying genes responsible for diseases (e.g., on/off combinations), in particular gene related diseases. A preferred application of such screening is cancer. In the same manner, screening for treatment for such diseases is included in the invention. Cells or animals may be exposed to aberrant conditions resulting in disease or disease like effects. Candidate compositions may be provided and screened for an effect in the desired multiplex environment. For example, a patient's cancer cells may be screened for which gene combinations will cause them to die, and then use this information to establish appropriate therapies.

[0330] In one embodiment, the invention provides a kit comprising one or more of the components described herein. The kit may include dead guides as described herein with or without guides as described herein.

[0331] The structural information provided herein allows for interrogation of dead gRNA interaction with the target DNA and the Cas9 permitting engineering or alteration of dead gRNA structure to optimize functionality of the entire Cas9 CRISPR-Cas system. For example, loops of the dead gRNA may be extended, without colliding with the Cas9 protein by the insertion of adaptor proteins that can bind to RNA. These adaptor proteins can further recruit effector proteins or fusions which comprise one or more functional domains.

[0332] In some preferred embodiments, the functional domain is a transcriptional activation domain, preferably VP64. In some embodiments, the functional domain is a transcription repression domain, preferably KRAB. In some embodiments, the transcription repression domain is SID, or concatemers of SID (e.g., SID4X). In some embodiments, the functional domain is an epigenetic modifying domain, such that an epigenetic modifying enzyme is provided. In some embodiments, the functional domain is an activation domain, which may be the P65 activation domain.

[0333] An embodiment of the invention is that the above elements are comprised in a single composition or comprised in individual compositions. These compositions may advantageously be applied to a host to elicit a functional effect on the genomic level. In general, the dead gRNA are modified in a manner that provides specific binding sites (e.g., aptamers) for adapter proteins comprising one or more functional domains (e.g., via fusion protein) to bind to. The modified dead gRNA are modified such that once the dead gRNA forms a CRISPR complex (i.e., Cas9 binding to dead gRNA and target) the adapter proteins bind and, the functional domain on the adapter protein is positioned in a spatial orientation which is advantageous for the attributed function to be effective. For example, if the functional domain is a transcription activator (e.g., VP64 or p65), the transcription activator is placed in a spatial orientation which allows it to affect the transcription of the target. Likewise, a transcription repressor will be advantageously positioned to affect the transcription of the target and a nuclease (e.g., Fok1) will be advantageously positioned to cleave or partially cleave the target.

[0334] The skilled person will understand that modifications to the dead gRNA which allow for binding of the adapter+functional domain but not proper positioning of the adapter+functional domain (e.g., due to steric hindrance within the three dimensional structure of the CRISPR complex) are modifications which are not intended. The one or more modified dead gRNA may be modified at the tetra loop, the stem loop 1, stem loop 2, or stem loop 3, as described herein, preferably at either the tetra loop or stem loop 2, and most preferably at both the tetra loop and stem loop 2.

[0335] As explained herein the functional domains may be, for example, one or more domains from the group consisting of methylase activity, demethylase activity, transcription activation activity, transcription repression activity, transcription release factor activity, histone modification activity, RNA cleavage activity, DNA cleavage activity, nucleic acid binding activity, and molecular switches (e.g., light inducible). In some cases, it is advantageous that additionally at least one NLS is provided. In some instances, it is advantageous to position the NLS at the N terminus. When more than one functional domain is included, the functional domains may be the same or different.

[0336] The dead gRNA may be designed to include multiple binding recognition sites (e.g., aptamers) specific to the same or different adapter protein. The dead gRNA may be designed to bind to the promoter region −1000-+1 nucleic acids upstream of the transcription start site (i.e., TSS), preferably −200 nucleic acids. This positioning improves functional domains which affect gene activation (e.g., transcription activators) or gene inhibition (e.g., transcription repressors). The modified dead gRNA may be one or more modified dead gRNAs targeted to one or more target loci (e.g., at least 1 gRNA, at least 2 gRNA, at least 5 gRNA, at least 10 gRNA, at least 20 gRNA, at least 30 gRNA, at least 50 gRNA) comprised in a composition.

[0337] The adaptor protein may be any number of proteins that binds to an aptamer or recognition site introduced into the modified dead gRNA and which allows proper positioning of one or more functional domains, once the dead gRNA has been incorporated into the CRISPR complex, to affect the target with the attributed function. As explained in detail in this application such may be coat proteins, preferably bacteriophage coat proteins. The functional domains associated with such adaptor proteins (e.g., in the form of fusion protein) may include, for example, one or more domains from the group consisting of methylase activity, demethylase activity, transcription activation activity, transcription repression activity, transcription release factor activity, histone modification activity, RNA cleavage activity, DNA cleavage activity, nucleic acid binding activity, and molecular switches (e.g., light inducible). Preferred domains are Fok1, VP64, P65, HSF1, MyoD1. In the event that the functional domain is a transcription activator or transcription repressor it is advantageous that additionally at least an NLS is provided and preferably at the N terminus. When more than one functional domain is included, the functional domains may be the same or different. The adaptor protein may utilize known linkers to attach such functional domains.

[0338] Thus, the modified dead gRNA, the (inactivated) Cas9 (with or without functional domains), and the binding protein with one or more functional domains, may each individually be comprised in a composition and administered to a host individually or collectively. Alternatively, these components may be provided in a single composition for administration to a host. Administration to a host may be performed via viral vectors known to the skilled person or described herein for delivery to a host (e.g., lentiviral vector, adenoviral vector, AAV vector). As explained herein, use of different selection markers (e.g., for lentiviral gRNA selection) and concentration of gRNA (e.g., dependent on whether multiple gRNAs are used) may be advantageous for eliciting an improved effect.

[0339] On the basis of this concept, several variations are appropriate to elicit a genomic locus event, including DNA cleavage, gene activation, or gene deactivation. Using the provided compositions, the person skilled in the art can advantageously and specifically target single or multiple loci with the same or different functional domains to elicit one or more genomic locus events. The compositions may be applied in a wide variety of methods for screening in libraries in cells and functional modeling in vivo (e.g., gene activation of lincRNA and identification of function; gain-of-function modeling; loss-of-function modeling; the use the compositions of the invention to establish cell lines and transgenic animals for optimization and screening purposes).

[0340] The current invention comprehends the use of the compositions of the current invention to establish and utilize conditional or inducible CRISPR transgenic cell/animals, which are not believed prior to the present invention or application. For example, the target cell comprises Cas9 conditionally or inducibly (e.g., in the form of Cre dependent constructs) and/or the adapter protein conditionally or inducibly and, on expression of a vector introduced into the target cell, the vector expresses that which induces or gives rise to the condition of Cas9 expression and/or adaptor expression in the target cell. By applying the teaching and compositions of the current invention with the known method of creating a CRISPR complex, inducible genomic events affected by functional domains are also an embodiment of the current invention. One example of this is the creation of a CRISPR knock-in/conditional transgenic animal (e.g., mouse comprising e.g. a Lox-Stop-polyA-Lox(LSL) cassette) and subsequent delivery of one or more compositions providing one or more modified dead gRNA (e.g., −200 nucleotides to TSS of a target gene of interest for gene activation purposes) as described herein (e.g. modified dead gRNA with one or more aptamers recognized by coat proteins, e.g., MS2), one or more adapter proteins as described herein (MS2 binding protein linked to one or more VP64) and means for inducing the conditional animal (e.g., Cre recombinase for rendering Cas9 expression inducible). Alternatively, the adaptor protein may be provided as a conditional or inducible element with a conditional or inducible Cas9 to provide an effective model for screening purposes, which advantageously only requires minimal design and administration of specific dead gRNAs for a broad number of applications.

[0341] In another embodiment the dead guides are further modified to improve specificity. Protected dead guides may be synthesized, whereby secondary structure is introduced into the 3′ end of the dead guide to improve its specificity. A protected guide RNA (pgRNA) comprises a guide sequence capable of hybridizing to a target sequence in a genomic locus of interest in a cell and a protector strand, wherein the protector strand is optionally complementary to the guide sequence and wherein the guide sequence may in part be hybridizable to the protector strand. The pgRNA optionally includes an extension sequence. The thermodynamics of the pgRNA-target DNA hybridization is determined by the number of bases complementary between the guide RNA and target DNA. By employing ‘thermodynamic protection’, specificity of dead gRNA can be improved by adding a protector sequence. For example, one method adds a complementary protector strand of varying lengths to the 3′ end of the guide sequence within the dead gRNA. As a result, the protector strand is bound to at least a portion of the dead gRNA and provides for a protected gRNA (pgRNA). In turn, the dead gRNA references herein may be easily protected using the described embodiments, resulting in pgRNA. The protector strand can be either a separate RNA transcript or strand or a chimeric version joined to the 3′ end of the dead gRNA guide sequence.

### Tandem Guides and Uses in a Multiplex (Tandem) Targeting Approach

[0342] The inventors have shown that CRISPR enzymes as defined herein can employ more than one RNA guide without losing activity. This enables the use of the CRISPR enzymes, systems or complexes as defined herein for targeting multiple DNA targets, genes or gene loci, with a single enzyme, system or complex as defined herein. The guide RNAs may be tandemly arranged, optionally separated by a nucleotide sequence such as a direct repeat as defined herein. The position of the different guide RNAs is the tandem does not influence the activity. It is noted that the terms “CRISPR-Cas system”, “CRISP-Cas complex” “CRISPR complex” and “CRISPR system” are used interchangeably. Also, the terms “CRISPR enzyme”, “Cas enzyme”, or “CRISPR-Cas enzyme”, can be used interchangeably. In preferred embodiments, said CRISPR enzyme, CRISP-Cas enzyme or Cas enzyme is Cas9, or any one of the modified or mutated variants thereof described herein elsewhere.

[0343] In one embodiment, the invention provides a non-naturally occurring or engineered CRISPR enzyme, preferably a class 2 CRISPR enzyme, preferably a Type V or VI CRISPR enzyme as described herein, such as without limitation Cas9 as described herein elsewhere, used for tandem or multiplex targeting. It is to be understood that any of the CRISPR (or CRISPR-Cas or Cas) enzymes, complexes, or systems according to the invention as described herein elsewhere may be used in such an approach. Any of the methods, products, compositions and uses as described herein elsewhere are equally applicable with the multiplex or tandem targeting approach further detailed below. By means of further guidance, the following particular embodiments and embodiments are provided.

[0344] In one embodiment, the invention provides for the use of a Cas9 enzyme, complex or system as defined herein for targeting multiple gene loci. In one embodiment, this can be established by using multiple (tandem or multiplex) guide RNA (gRNA) sequences.

[0345] In one embodiment, the invention provides methods for using one or more elements of a Cas9 enzyme, complex or system as defined herein for tandem or multiplex targeting, wherein said CRISP system comprises multiple guide RNA sequences. Preferably, said gRNA sequences are separated by a nucleotide sequence, such as a direct repeat as defined herein elsewhere.

[0346] The Cas9 enzyme, system or complex as defined herein provides an effective means for modifying multiple target polynucleotides. The Cas9 enzyme, system or complex as defined herein has a wide variety of utility including modifying (e.g., deleting, inserting, translocating, inactivating, activating) one or more target polynucleotides in a multiplicity of cell types. As such the Cas9 enzyme, system or complex as defined herein of the invention has a broad spectrum of applications in, e.g., gene therapy, drug screening, disease diagnosis, and prognosis, including targeting multiple gene loci within a single CRISPR system.

[0347] In one embodiment, the invention provides a Cas9 enzyme, system or complex as defined herein, i.e., a Cas9 CRISPR-Cas complex having a Cas9 protein having at least one destabilization domain associated therewith, and multiple guide RNAs that target multiple nucleic acid molecules such as DNA molecules, whereby each of said multiple guide RNAs specifically targets its corresponding nucleic acid molecule, e.g., DNA molecule. Each nucleic acid molecule target, e.g., DNA molecule can encode a gene product or encompass a gene locus. Using multiple guide RNAs hence enables the targeting of multiple gene loci or multiple genes. In some embodiments the Cas9 enzyme may cleave the DNA molecule encoding the gene product. In some embodiments expression of the gene product is altered. The Cas9 protein and the guide RNAs do not naturally occur together. The invention comprehends the guide RNAs comprising tandemly arranged guide sequences. The invention further comprehends coding sequences for the Cas9 protein being codon optimized for expression in a eukaryotic cell. In a preferred embodiment the eukaryotic cell is a mammalian cell, a plant cell or a yeast cell and in a more preferred embodiment the mammalian cell is a human cell. Expression of the gene product may be decreased. The Cas9 enzyme may form part of a CRISPR system or complex, which further comprises tandemly arranged guide RNAs (gRNAs) comprising a series of 2, 3, 4, 5, 6, 7, 8, 9, 10, 15, 25, 25, 30, or more than 30 guide sequences, each capable of specifically hybridizing to a target sequence in a genomic locus of interest in a cell. In some embodiments, the functional Cas9 CRISPR system or complex binds to the multiple target sequences. In some embodiments, the functional CRISPR system or complex may edit the multiple target sequences, e.g., the target sequences may comprise a genomic locus, and in some embodiments, there may be an alteration of gene expression. In some embodiments, the functional CRISPR system or complex may comprise further functional domains. In some embodiments, the invention provides a method for altering or modifying expression of multiple gene products. The method may comprise introducing into a cell containing said target nucleic acids, e.g., DNA molecules, or containing and expressing target nucleic acid, e.g.. DNA molecules; for instance, the target nucleic acids may encode gene products or provide for expression of gene products (e.g., regulatory sequences).

[0348] In preferred embodiments the CRISPR enzyme used for multiplex targeting is Cas9, or the CRISPR system or complex comprises Cas9. In some embodiments, the CRISPR enzyme used for multiplex targeting is AsCas9, or the CRISPR system or complex used for multiplex targeting comprises an AsCas9. In some embodiments, the CRISPR enzyme is an LbCas9, or the CRISPR system or complex comprises LbCas9. In some embodiments, the Cas9 enzyme used for multiplex targeting cleaves both strands of DNA to produce a double strand break (DSB). In some embodiments, the CRISPR enzyme used for multiplex targeting is a nickase. In some embodiments, the Cas9 enzyme used for multiplex targeting is a dual nickase. In some embodiments, the Cas9 enzyme used for multiplex targeting is a Cas9 enzyme such as a DD Cas9 enzyme as defined herein elsewhere.

[0349] In some general embodiments, the Cas9 enzyme used for multiplex targeting is associated with one or more functional domains. In some more specific embodiments, the CRISPR enzyme used for multiplex targeting is a deadCas9 as defined herein elsewhere.

[0350] In an embodiment, the present invention provides a means for delivering the Cas9 enzyme, system or complex for use in multiple targeting as defined herein or the polynucleotides defined herein. Non-limiting examples of such delivery means are e.g., particle(s) delivering component(s) of the complex, vector(s) comprising the polynucleotide(s) discussed herein (e.g., encoding the CRISPR enzyme, providing the nucleotides encoding the CRISPR complex). In some embodiments, the vector may be a plasmid or a viral vector such as AAV, or lentivirus. Transient transfection with plasmids, e.g., into HEK cells may be advantageous, especially given the size limitations of AAV and that while Cas9 fits into AAV, one may reach an upper limit with additional guide RNAs.

[0351] Also provided is a model that constitutively expresses the Cas9 enzyme, complex or system as used herein for use in multiplex targeting. The organism may be transgenic and may have been transfected with the present vectors or may be the offspring of an organism so transfected. In a further embodiment, the present invention provides compositions comprising the CRISPR enzyme, system and complex as defined herein or the polynucleotides or vectors described herein. Also provides are Cas9 CRISPR systems or complexes comprising multiple guide RNAs, preferably in a tandemly arranged format. Said different guide RNAs may be separated by nucleotide sequences such as direct repeats.

[0352] Also provided is a method of treating a subject, e.g., a subject in need thereof, comprising inducing gene editing by transforming the subject with the polynucleotide encoding the Cas9 CRISPR system or complex or any of polynucleotides or vectors described herein and administering them to the subject. A suitable repair template may also be provided, for example delivered by a vector comprising said repair template. Also provided is a method of treating a subject, e.g., a subject in need thereof, comprising inducing transcriptional activation or repression of multiple target gene loci by transforming the subject with the polynucleotides or vectors described herein, wherein said polynucleotide or vector encodes or comprises the Cas9 enzyme, complex or system comprising multiple guide RNAs, preferably tandemly arranged. Where any treatment is occurring ex vivo, for example in a cell culture, then it will be appreciated that the term ‘subject’ may be replaced by the phrase “cell or cell culture.”

[0353] Compositions comprising Cas9 enzyme, complex or system comprising multiple guide RNAs, preferably tandemly arranged, or the polynucleotide or vector encoding or comprising said Cas9 enzyme, complex or system comprising multiple guide RNAs, preferably tandemly arranged, for use in the methods of treatment as defined herein elsewhere are also provided. A kit of parts may be provided including such compositions. Use of said composition in the manufacture of a medicament for such methods of treatment are also provided. Use of a Cas9 CRISPR system in screening is also provided by the present invention, e.g., gain of function screens. Cells which are artificially forced to overexpress a gene are able to down regulate the gene over time (re-establishing equilibrium) e.g., by negative feedback loops. By the time the screen starts the unregulated gene might be reduced again. Using an inducible Cas9 activator allows one to induce transcription right before the screen and therefore minimizes the chance of false negative hits. Accordingly, by use of the instant invention in screening, e.g., gain of function screens, the chance of false negative results may be minimized.

[0354] In one embodiment, the invention provides an engineered, non-naturally occurring CRISPR system comprising a Cas9 protein and multiple guide RNAs that each specifically target a DNA molecule encoding a gene product in a cell, whereby the multiple guide RNAs each target their specific DNA molecule encoding the gene product and the Cas9 protein cleaves the target DNA molecule encoding the gene product, whereby expression of the gene product is altered; and, wherein the CRISPR protein and the guide RNAs do not naturally occur together. The invention comprehends the multiple guide RNAs comprising multiple guide sequences, preferably separated by a nucleotide sequence such as a direct repeat and optionally fused to a tracr sequence. In an embodiment of the invention the CRISPR protein is a ty pe V or VI CRISPR-Cas protein and in a more preferred embodiment the CRISPR protein is a Cas9 protein. The invention further comprehends a Cas9 protein being codon optimized for expression in a eukaryotic cell. In a preferred embodiment the eukaryotic cell is a mammalian cell and in a more preferred embodiment the mammalian cell is a human cell. In a further embodiment of the invention, the expression of the gene product is decreased.

[0355] In another embodiment, the invention provides an engineered, non-naturally occurring vector system comprising one or more vectors comprising a first regulatory element operably linked to the multiple Cas9 CRISPR system guide RNAs that each specifically target a DNA molecule encoding a gene product and a second regulatory element operably linked coding for a CRISPR protein. Both regulatory elements may be located on the same vector or on different vectors of the system. The multiple guide RNAs target the multiple DNA molecules encoding the multiple gene products in a cell and the CRISPR protein may cleave the multiple DNA molecules encoding the gene products (it may cleave one or both strands or have substantially no nuclease activity), whereby expression of the multiple gene products is altered; and, wherein the CRISPR protein and the multiple guide RNAs do not naturally occur together. In a preferred embodiment the CRISPR protein is Cas9 protein, optionally codon optimized for expression in a eukaryotic cell. In a preferred embodiment the eukaryotic cell is a mammalian cell, a plant cell or a yeast cell and in a more preferred embodiment the mammalian cell is a human cell. In a further embodiment of the invention, the expression of each of the multiple gene products is altered, preferably decreased.

[0356] In one embodiment, the invention provides a vector system comprising one or more vectors. In some embodiments, the system comprises: (a) a first regulatory element operably linked to a direct repeat sequence and one or more insertion sites for inserting one or more guide sequences up- or downstream (whichever applicable) of the direct repeat sequence, wherein when expressed, the one or more guide sequence(s) direct(s) sequence-specific binding of the CRISPR complex to the one or more target sequence(s) in a eukaryotic cell, wherein the CRISPR complex comprises a Cas9 enzyme complexed with the one or more guide sequence(s) that is hybridized to the one or more target sequence(s); and (b) a second regulatory element operably linked to an enzyme-coding sequence encoding said Cas9 enzyme, preferably comprising at least one nuclear localization sequence and/or at least one NES; wherein components (a) and (b) are located on the same or different vectors of the system. Where applicable, a tracr sequence may also be provided. In some embodiments, component (a) further comprises two or more guide sequences operably linked to the first regulatory element, wherein when expressed, each of the two or more guide sequences direct sequence specific binding of a Cas9 CRISPR complex to a different target sequence in a eukaryotic cell. In some embodiments, the CRISPR complex comprises one or more nuclear localization sequences and/or one or more NES of sufficient strength to drive accumulation of said Cas9 CRISPR complex in a detectable amount in or out of the nucleus of a eukaryotic cell. In some embodiments, the first regulatory element is a polymerase III promoter. In some embodiments, the second regulatory element is a polymerase II promoter. In some embodiments, each of the guide sequences is at least 16, 17, 18, 19, 20, 25 nucleotides, or between 16-30, or between 16-25, or between 16-20 nucleotides in length.

[0357] Recombinant expression vectors can comprise the polynucleotides encoding the Cas9 enzyme, system or complex for use in multiple targeting as defined herein in a form suitable for expression of the nucleic acid in a host cell, which means that the recombinant expression vectors include one or more regulatory elements, which may be selected on the basis of the host cells to be used for expression, that is operatively-linked to the nucleic acid sequence to be expressed.

[0358] In some embodiments, a host cell is transiently or non-transiently transfected with one or more vectors comprising the polynucleotides encoding the Cas9 enzyme, system or complex for use in multiple targeting as defined herein. In some embodiments, a cell is transfected as it naturally occurs in a subject. In some embodiments, a cell that is transfected is taken from a subject. In some embodiments, the cell is derived from cells taken from a subject, such as a cell line. A wide variety of cell lines for tissue culture are known in the art and exemplified herein elsewhere. Cell lines are available from a variety of sources known to those with skill in the art (see, e.g., the American Type Culture Collection (ATCC) (Manassas, Va.)). In some embodiments, a cell transfected with one or more vectors comprising the polynucleotides encoding the Cas9 enzyme, system or complex for use in multiple targeting as defined herein is used to establish a new cell line comprising one or more vector-derived sequences. In some embodiments, a cell transiently transfected with the components of a Cas9 CRISPR system or complex for use in multiple targeting as described herein (such as by transient transfection of one or more vectors, or transfection with RNA), and modified through the activity of a Cas9 CRISPR system or complex, is used to establish a new cell line comprising cells containing the modification but lacking any other exogenous sequence. In some embodiments, cells transiently or non-transiently transfected with one or more vectors comprising the polynucleotides encoding the Cas9 enzyme, system or complex for use in multiple targeting as defined herein, or cell lines derived from such cells are used in assessing one or more test compounds.

[0359] The term “regulatory element” is as defined herein elsewhere.

[0360] Advantageous vectors include lentiviruses and adeno-associated viruses, and types of such vectors can also be selected for targeting particular types of cells.

[0361] In one embodiment, the invention provides a eukaryotic host cell comprising (a) a first regulatory element operably linked to a direct repeat sequence and one or more insertion sites for inserting one or more guide RNA sequences up- or downstream (whichever applicable) of the direct repeat sequence, wherein when expressed, the guide sequence(s) direct(s) sequence-specific binding of the Cas9 CRISPR complex to the respective target sequence(s) in a eukaryotic cell, wherein the Cas9 CRISPR complex comprises a Cas9 enzyme complexed with the one or more guide sequence(s) that is hybridized to the respective target sequence(s); and/or (b) a second regulatory element operably linked to an enzyme-coding sequence encoding said Cas9 enzyme comprising preferably at least one nuclear localization sequence and/or NES. In some embodiments, the host cell comprises components (a) and (b). Where applicable, a tracr sequence may also be provided. In some embodiments, component (a), component (b), or components (a) and (b) are stably integrated into a genome of the host eukaryotic cell. In some embodiments, component (a) further comprises two or more guide sequences operably linked to the first regulatory element, and optionally separated by a direct repeat, wherein when expressed, each of the two or more guide sequences direct sequence specific binding of a Cas9 CRISPR complex to a different target sequence in a eukaryotic cell. In some embodiments, the Cas9 enzyme comprises one or more nuclear localization sequences and/or nuclear export sequences or NES of sufficient strength to drive accumulation of said CRISPR enzyme in a detectable amount in and/or out of the nucleus of a eukaryotic cell.

[0362] In some embodiments, the Cas9 enzyme is a type V or VI CRISPR system enzyme. In some embodiments, the Cas9 enzyme is a Cas9 enzyme. In some embodiments, the Cas9 enzyme is derived from Francisella tularensis 1, Francisella tularensis subsp. novicida, Prevotella albensis, Lachnospiraceae bacterium MC2017 1, Butyrivibrio proteoclasticus, Peregrinibacteria bacterium GW2011_GWA2_33_10, Parcubacteria bacterium GW2011_GWC2_44_17, Smithella sp. SCADC, Acidaminococcus sp. BV3L6, Lachnospiraceae bacterium MA2020, Candidatus Methanoplasma termitum, Eubacterium eligens, Moraxella bovoculi 237, Leptospira inadai, Lachnospiraceae bacterium ND2006, Porphyromonas crevioricanis 3, Prevotella disiens, or Porphyromonas macacae Cas9, and may include further alterations or mutations of the Cas9 as defined herein elsewhere, and can be a chimeric Cas9. In some embodiments, the Cas9 enzyme is codon-optimized for expression in a eukaryotic cell. In some embodiments, the CRISPR enzyme directs cleavage of one or two strands at the location of the target sequence. In some embodiments, the first regulatory element is a polymerase III promoter. In some embodiments, the second regulatory element is a polymerase II promoter. In some embodiments, the one or more guide sequence(s) is (are each) at least 16, 17, 18, 19, 20, 25 nucleotides, or between 16-30, or between 16-25, or between 16-20 nucleotides in length. When multiple guide RNAs are used, they are preferably separated by a direct repeat sequence.

[0363] In one embodiment, the invention provides a method of modifying multiple target polynucleotides in a host cell such as a eukaryotic cell. In some embodiments, the method comprises allowing a Cas9CRISPR complex to bind to multiple target polynucleotides, e.g., to effect cleavage of said multiple target polynucleotides, thereby modifying multiple target polynucleotides, wherein the Cas9CRISPR complex comprises a Cas9 enzyme complexed with multiple guide sequences each of them being hybridized to a specific target sequence within said target polynucleotide, wherein said multiple guide sequences are linked to a direct repeat sequence. Where applicable, a tracr sequence may also be provided (e.g., to provide a single guide RNA, sgRNA). In some embodiments, said cleavage comprises cleaving one or two strands at the location of each of the target sequence by said Cas9 enzyme. In some embodiments, said cleavage results in decreased transcription of the multiple target genes. In some embodiments, the method further comprises repairing one or more of said cleaved target polynucleotide by homologous recombination with an exogenous template polynucleotide, wherein said repair results in a mutation comprising an insertion, deletion, or substitution of one or more nucleotides of one or more of said target polynucleotides. In some embodiments, said mutation results in one or more amino acid changes in a protein expressed from a gene comprising one or more of the target sequence(s). In some embodiments, the method further comprises delivering one or more vectors to said eukaryotic cell, wherein the one or more vectors drive expression of one or more of: the Cas9 enzyme and the multiple guide RNA sequence linked to a direct repeat sequence. Where applicable, a tracr sequence may also be provided. In some embodiments, said vectors are delivered to the eukaryotic cell in a subject. In some embodiments, said modifying takes place in said eukaryotic cell in a cell culture. In some embodiments, the method further comprises isolating said eukaryotic cell from a subject prior to said modifying. In some embodiments, the method further comprises returning said eukaryotic cell and/or cells derived therefrom to said subject.

[0364] In one embodiment, the invention provides a method of modifying expression of multiple polynucleotides in a eukaryotic cell. In some embodiments, the method comprises allowing a Cas9 CRISPR complex to bind to multiple polynucleotides such that said binding results in increased or decreased expression of said polynucleotides; wherein the Cas9 CRISPR complex comprises a Cas9 enzyme complexed with multiple guide sequences each specifically hybridized to its own target sequence within said polynucleotide, wherein said guide sequences are linked to a direct repeat sequence. Where applicable, a tracr sequence may also be provided. In some embodiments, the method further comprises delivering one or more vectors to said eukaryotic cells, wherein the one or more vectors drive expression of one or more of: the Cas9 enzyme and the multiple guide sequences linked to the direct repeat sequences. Where applicable, a tracr sequence may also be provided.

[0365] In one embodiment, the invention provides a recombinant polynucleotide comprising multiple guide RNA sequences up- or downstream (whichever applicable) of a direct repeat sequence, wherein each of the guide sequences when expressed directs sequence-specific binding of a Cas9CRISPR complex to its corresponding target sequence present in a eukaryotic cell. In some embodiments, the target sequence is a viral sequence present in a eukaryotic cell. Where applicable, a tracr sequence may also be provided. In some embodiments, the target sequence is a proto-oncogene or an oncogene.

[0366] Embodiments of the invention encompass a non-naturally occurring or engineered composition that may comprise a guide RNA (gRNA) comprising a guide sequence capable of hybridizing to a target sequence in a genomic locus of interest in a cell and a Cas9 enzyme as defined herein that may comprise at least one or more nuclear localization sequences.

[0367] An embodiment of the invention encompasses methods of modifying a genomic locus of interest to change gene expression in a cell by introducing into the cell any of the compositions described herein.

[0368] An embodiment of the invention is that the above elements are comprised in a single composition or comprised in individual compositions. These compositions may advantageously be applied to a host to elicit a functional effect on the genomic level.

### Engineered Cells and Organisms Expressing Said Engineered AAV Capsids

[0369] Described herein are engineered cells that can include one or more of the engineered AAV capsid polynucleotides, polypeptides, vectors, and/or vector systems. In some embodiments, one or more of the engineered AAV capsid polynucleotides can be expressed in the engineered cells. In some embodiments, the engineered cells can be capable of producing engineered AAV capsid proteins and/or engineered AAV capsid particles that are described elsewhere herein. Also described herein are modified or engineered organisms that can include one or more engineered cells described herein. The engineered cells can be engineered to express a cargo molecule (e.g., a cargo polynucleotide) dependently or independently of an engineered AAV capsid polynucleotide as described elsewhere herein.

[0370] A wide variety of animals, plants, algae, fungi, yeast, etc. and animal, plant, algae, fungus, yeast cell or tissue systems may be engineered to express one or more nucleic acid constructs of the engineered AAV capsid system described herein using various transformation methods mentioned elsewhere herein. This can produce organisms that can produce engineered AAV capsid particles, such as for production purposes, engineered AAV capsid design and/or generation, and/or model organisms. In some embodiments, the polynucleotide(s) encoding one or more components of the engineered AAV capsid system described herein can be stably or transiently incorporated into one or more cells of a plant, animal, algae, fungus, and/or yeast or tissue system. In some embodiments, one or more of engineered AAV capsid system polynucleotides are genomically incorporated into one or more cells of a plant, animal, algae, fungus, and/or yeast or tissue system. Further embodiments of the modified organisms and systems are described elsewhere herein. In some embodiments, one or more components of the engineered AAV capsid system described herein are expressed in one or more cells of the plant, animal, algae, fungus, yeast, or tissue systems.

### Engineered Cells

[0371] Described herein are various embodiments of engineered cells that can include one or more of the engineered AAV capsid system polynucleotides, polypeptides, vectors, and/or vector systems described elsewhere herein. In some embodiments, the cells can express one or more of the engineered AAV capsid polynucleotides and can produce one or more engineered AAV capsid particles, which are described in greater detail herein. Such cells are also referred to herein as “producer cells”. It will be appreciated that these engineered cells are different from “modified cells” described elsewhere herein in that the modified cells are not necessarily producer cells (i.e., they do not make engineered GTA delivery particles) unless they include one or more of the engineered AAV capsid polynucleotides, engineered AAV capsid vectors or other vectors described herein that render the cells capable of producing an engineered AAV capsid particle. Modified cells can be recipient cells of an engineered AAV capsid particles and can, in some embodiments, be modified by the engineered AAV capsid particle(s) and/or a cargo polynucleotide delivered to the recipient cell. Modified cells are discussed in greater detail elsewhere herein. The term modification can be used in connection with modification of a cell that is not dependent on being a recipient cell. For example, isolated cells can be modified prior to receiving an engineered AAV capsid molecule.

[0372] In an embodiment, the invention provides a non-human eukaryotic organism; for example, a multicellular eukaryotic organism, including a eukaryotic host cell containing one or more components of an engineered delivery system described herein according to any of the described embodiments. In other embodiments, the invention provides a eukaryotic organism; preferably a multicellular eukaryotic organism, comprising a eukaryotic host cell containing one or more components of an engineered delivery system described herein according to any of the described embodiments. In some embodiments, the organism is a host of AAV.

[0373] In particular embodiments, the plants, algae, fungi, yeast, etc., cells or parts obtained are transgenic plants, comprising an exogenous DNA sequence incorporated into the genome of all or part of the cells.

[0374] The engineered cell can be a prokaryotic cell. The prokaryotic cell can be bacterial cell. The prokaryotic cell can be an archaea cell. The bacterial cell can be any suitable bacterial cell. Suitable bacterial cells can be from the genus Escherichia, Bacillus, Lactobacillus, Rhodococcus, Rodhobacter, Synechococcus, Synechoystis, Pseudomonas, Psedoaltermonas, Stenotrophamonas, and Streptomyces Suitable bacterial cells include, but are not limited to Escherichia coli cells, Caulobacter crescentus cells, Rodhobacter sphaeroides cells, Psedoaltermonas haloplanktis cells. Suitable strains of bacterial include, but are not limited to BL21(DE3), DL21(DE3)-pLysS, BL21 Star-pLysS, BL21-SI, BL21-AI, Tuner, Tuner pLysS, Origami, Origami B pLysS, Rosetta, Rosetta pLysS, Rosetta-gami-pLysS, BL21 CodonPlus, AD494, BL2trxB, HMS174, NovaBlue(DE3), BLR, C41(DE3), C43(DE3), Lemo21(DE3), Shuffle T7, ArcticExpress and ArticExpress (DE3).

[0375] The engineered cell can be a eukaryotic cell. The eukaryotic cells may be those of or derived from a particular organism, such as a plant or a mammal, including but not limited to human, or non-human eukaryote or animal or mammal as herein discussed, e.g., mouse, rat, rabbit, dog, livestock, or non-human mammal or primate. In some embodiments the engineered cell can be a cell line. Examples of cell lines include, but are not limited to, C8161, CCRF-CEM, MOLT, mIMCD-3, NHDF, HeLa-S3, HuhI, Huh4, Huh7, HUVEC, HASMC, HEKn, HEKa, MiaPaCell, Pancl, PC-3, TF1, CTLL-2, C1R, Rat6, CV1, RPTE, A10, T24, J82, A375, ARH-77, Calul, SW480, SW620, SKOV3, SK-UT, CaCo2, P388D1, SEM-K2, WEHI-231, HB56, TIB55, Jurkat, J45.01, LRMB, Bcl-1, BC-3, IC21, DLD2, Raw264.7, NRK, NRK-52E, MRC5, MEF, Hep G2, HeLa B, HeLa T4, COS, COS-1, COS-6, COS-M6A, BS-C-1 monkey kidney epithelial, BALB/3T3 mouse embryo fibroblast, 3T3 Swiss, 3T3-L1, 132-d5 human fetal fibroblasts; 10.1 mouse fibroblasts, 293-T, 3T3, 721, 9L, A2780, A2780ADR, A2780cis, A172, A20, A253, A431, A-549, ALC, B16, B35, BCP-1 cells, BEAS-2B, bEnd.3, BHK-21, BR 293, BxPC3, C3H-10T1/2, C6/36, Cal-27, CHO, CHO-7, CHO-IR, CHO-K1, CHO-K2, CHO-T, CHO Dhfr −/−, COR-L23, COR-L23/CPR, COR-L23/5010, COR-L23/R23, COS-7, COV-434, CML T1, CMT, CT26, D17, DH82, DU145, DuCaP, EL4, EM2, EM3, EMT6/AR1, EMT6/AR10.0, FM3, H1299, H69, HB54, HB55, HCA2, HEK-293, HeLa, Hepalclc7, HL-60, HMEC, HT-29, Jurkat, JY cells, K562 cells, Ku812, KCL22, KG1, KYO1, LNCap, Ma-Mel 1-48, MC-38, MCF-7, MCF-10A, MDA-MB-231, MDA-MB-468, MDA-MB-435, MDCK II, MDCK II, MOR/0.2R, MONO-MAC 6, MTD-1A, MyEnd, NCI-H69/CPR, NCI-H69/LX10, NCI-H69/LX20, NCI-H69/LX4, NIH-3T3, NALM-1, NW-145, OPCN/OPCT cell lines, Peer, PNT-1A/PNT 2, RenCa, RIN-5F, RMA/RMAS, Saos-2 cells, Sf-9, SkBr3. T2, T-47D, T84, THPI cell line, U373, U87, U937, VCaP, Vero cells, WM39, WT-49, X63, YAC-1, YAR, and transgenic varieties thereof. Cell lines are available from a variety of sources known to those with skill in the art (see, e.g., the American Type Culture Collection (ATCC) (Manassas, Va.)).

[0376] In some embodiments, the engineered cell is a muscle cell (e.g. cardiac muscle, skeletal muscle, and/or smooth muscle), bone cell, blood cell, stromal cell, immune cell (including but not limited to B cells, macrophages, T-cells, CAR-T cells, and the like), kidney cells, bladder cells, lung cells, heart cells, liver cells, brain cells, neurons, skin cells, stomach cells, neuronal support cells, intestinal cells, epithelial cells, endothelial cells, stem or other progenitor cells, adrenal gland cells, cartilage cells, and combinations thereof.

[0377] In some embodiments, the engineered cell can be a fungus cell. As used herein, a “fungal cell” refers to any type of eukaryotic cell within the kingdom of fungi. Phyla within the kingdom of fungi include Ascomycota, Basidiomycota, Blastocladiomycota, Chytridiomycota, Glomeromycota, Microsporidia, and Neocallimastigomycota. Fungal cells may include yeasts, molds, and filamentous fungi. In some embodiments, the fungal cell is a yeast cell.

[0378] As used herein, the term “yeast cell” refers to any fungal cell within the phyla Ascomycota and Basidiomycota. Yeast cells may include budding yeast cells, fission yeast cells, and mold cells. Without being limited to these organisms, many types of yeast used in laboratory and industrial settings are part of the phylum Ascomycota. In some embodiments, the yeast cell is an S. cerevisiae, Kluyveromyces marxianus, or Issatchenkia orientalis cell. Other yeast cells may include without limitation Candida spp. (e.g., Candida albicans), Yarrowia spp. (e.g., Yarrowia lipolytica), Pichia spp. (e.g., Pichia pastoris), Kluyveromyces spp. (e.g., Kluyveromyces lactis and Kluyveromyces marxianus), Neurospora spp. (e.g., Neurospora crassa), Fusarium spp. (e.g., Fusarium oxysporum), and Issatchenkia spp. (e.g., Issatchenkia orientalis, a.k.a. Pichia kudriavzevii and Candida acidothermophilum). In some embodiments, the fungal cell is a filamentous fungal cell. As used herein, the term “filamentous fungal cell” refers to any type of fungal cell that grows in filaments, i.e., hyphae or mycelia. Examples of filamentous fungal cells may include without limitation Aspergillus spp. (e.g., Aspergillus niger), Trichoderma spp. (e.g., Trichoderma reesei), Rhizopus spp. (e.g., Rhizopus oryzae), and Mortierella spp. (e.g., Mortierella isabellina).

[0379] In some embodiments, the fungal cell is an industrial strain. As used herein, “industrial strain” refers to any strain of fungal cell used in or isolated from an industrial process, e.g., production of a product on a commercial or industrial scale. Industrial strain may refer to a fungal species that is typically used in an industrial process, or it may refer to an isolate of a fungal species that may be also used for non-industrial purposes (e.g., laboratory research). Examples of industrial processes may include fermentation (e.g., in production of food or beverage products), distillation, biofuel production, production of a compound, and production of a polypeptide. Examples of industrial strains can include, without limitation, JAY270 and ATCC4124.

[0380] In some embodiments, the fungal cell is a polyploid cell. As used herein, a “polyploid” cell may refer to any cell whose genome is present in more than one copy. A polyploid cell may refer to a type of cell that is naturally found in a polyploid state, or it may refer to a cell that has been induced to exist in a polyploid state (e.g., through specific regulation, alteration, inactivation, activation, or modification of meiosis, cytokinesis, or DNA replication). A polyploid cell may refer to a cell whose entire genome is polyploid, or it may refer to a cell that is polyploid in a particular genomic locus of interest.

[0381] In some embodiments, the fungal cell is a diploid cell. As used herein, a “diploid” cell may refer to any cell whose genome is present in two copies. A diploid cell may refer to a type of cell that is naturally found in a diploid state, or it may refer to a cell that has been induced to exist in a diploid state (e.g., through specific regulation, alteration, inactivation, activation, or modification of meiosis, cytokinesis, or DNA replication). For example, the S. cerevisiae strain S228C may be maintained in a haploid or diploid state. A diploid cell may refer to a cell whose entire genome is diploid, or it may refer to a cell that is diploid in a particular genomic locus of interest. In some embodiments, the fungal cell is a haploid cell. As used herein, a “haploid” cell may refer to any cell whose genome is present in one copy. A haploid cell may refer to a type of cell that is naturally found in a haploid state, or it may refer to a cell that has been induced to exist in a haploid state (e.g., through specific regulation, alteration, inactivation, activation, or modification of meiosis, cytokinesis, or DNA replication). For example, the S. cerevisiae strain S228C may be maintained in a haploid or diploid state. A haploid cell may refer to a cell whose entire genome is haploid, or it may refer to a cell that is haploid in a particular genomic locus of interest.

[0382] In some embodiments, the engineered cell is a cell obtained from a subject. In some embodiments, the subject is a healthy or non-diseased subject. In some embodiments, the subject is a subject with a desired physiological and/or biological characteristic such that when an engineered AAV capsid particle is produced it can package one or more cargo polynucleotides that can be related to the desired physiological and/or biological characteristic and/or capable of modifying the desired physiological and/or biological characteristic. Thus, the cargo polynucleotides of the produced engineered AAV capsid particle can be capable of transferring the desired characteristic to a recipient cell. In some embodiments, the cargo polynucleotides are capable of modifying a polynucleotide of the engineered cell such that the engineered cell has a desired physiological and/or biological characteristic.

[0383] In some embodiments, a cell transfected with one or more vectors described herein is used to establish a new cell line comprising one or more vector-derived sequences.

[0384] The engineered cells can be used to produce engineered viral (e.g., AAV) capsid polynucleotides, vectors, and/or particles. In some embodiments, the engineered viral (e.g., AAV) capsid polynucleotides, vectors, and/or particles are produced, harvested, and/or delivered to a subject in need thereof. In some embodiments, the engineered cells are delivered to a subject. Other uses for the engineered cells are described elsewhere herein. In some embodiments, the engineered cells can be included in formulations and/or kits described elsewhere herein.

[0385] The engineered cells can be stored short-term or long-term for use at a later time. Suitable storage methods are generally known in the art. Further, methods of restoring the stored cells for use (such as thawing, reconstitution, and otherwise stimulating metabolism in the engineered cell after storage) at a later time are also generally known in the art.

### Formulations

[0386] The compositions, polynucleotides, polypeptides, particles, cells, vector systems and combinations thereof described herein can be contained in a formulation, such as a pharmaceutical formulation. In some embodiments, the formulations can be used to generate polypeptides and other particles that include one or more hematopoietic cell-specific targeting moieties described herein. In some embodiments, the formulations can be delivered to a subject in need thereof. In some embodiments, component(s) of the engineered AAV capsid system, engineered cells, engineered AAV capsid particles, and/or combinations thereof described herein can be included in a formulation that can be delivered to a subject or a cell. In some embodiments, the formulation is a pharmaceutical formulation. One or more of the polypeptides, polynucleotides, vectors, cells, and combinations thereof described herein can be provided to a subject in need thereof or a cell alone or as an active ingredient, such as in a pharmaceutical formulation. As such, also described herein are pharmaceutical formulations containing an amount of one or more of the polypeptides, polynucleotides, vectors, cells, or combinations thereof described herein. In some embodiments, the pharmaceutical formulation can contain an effective amount of the one or more of the polypeptides, polynucleotides, vectors, cells, and combinations thereof described herein. The pharmaceutical formulations described herein can be administered to a subject in need thereof or a cell.

[0387] In some embodiments, the amount of the one or more of the polypeptides, polynucleotides, vectors, cells, virus particles, nanoparticles, other delivery particles, and combinations thereof described herein contained in the pharmaceutical formulation can range from about 1 pg/kg to about 10 mg/kg based upon the bodyweight of the subject in need thereof or average bodyweight of the specific patient population to which the pharmaceutical formulation can be administered. The amount of the one or more of the polypeptides, polynucleotides, vectors, cells, and combinations thereof described herein in the pharmaceutical formulation can range from about 1 pg to about 10 g, from about 10 nL to about 10 ml. In embodiments where the pharmaceutical formulation contains one or more cells, the amount can range from about 1 cell to 1×10², 1×10³, 1×10⁴, 1×10⁵, 1×10⁶, 1×10⁷, 1×10⁸, 1×10⁹, 1×10¹⁰ or more cells. In embodiments where the pharmaceutical formulation contains one or more cells, the amount can range from about 1 cell to 1×10², 1×10³, 1×10⁴, 1×10⁵, 1×10⁶, 1×10⁷, 1×10¹, 1×10⁹, 1×10¹⁰ or more cells per nL, μL, mL, or L.

[0388] In some embodiments, where engineered AAV capsid particles are included in the formulation, the formulation can contain 1 to 1×10¹, 1×10², 1×10³, 1×10⁴, 1×10⁵, 1×10⁶, 1×10⁷, 1×10⁸, 1×10⁹, 1×10¹⁰, 1×10¹¹, 1×10¹², 1×10¹³, 1×10¹⁴, 1×10¹⁵, 1×10¹⁶, 1×10¹⁷, 1×10¹⁸, 1×10¹⁹, or 1×10²⁰ transducing units (TU)/mL of the engineered AAV capsid particles. In some embodiments, the formulation can be 0.1 to 100 mL in volume and can contain 1 to 1×10¹, 1×10², 1×10³, 1×10⁴, 1×10⁵, 1×10⁶, 1×10⁷, 1×10⁸, 1×10⁹, 1×10¹⁰, 1×10¹¹, 1×10¹², 1×10¹³, 1×10¹⁴, 1×10¹⁵, 1×10¹⁶, 1×10¹⁷, 1×10¹⁸, 1×10¹⁹, or 1×10²⁰ transducing units (TU)/mL of the engineered AAV capsid particles.

### Pharmaceutically Acceptable Carriers and Auxiliary Ingredients and Agents

[0389] In some embodiments, the pharmaceutical formulation containing an amount of one or more of the polypeptides, polynucleotides, vectors, cells, virus particles, nanoparticles, other delivery particles, and combinations thereof described herein can further include a pharmaceutically acceptable carrier. Suitable pharmaceutically acceptable carriers include, but are not limited to, water, salt solutions, alcohols, gum arabic, vegetable oils, benzyl alcohols, polyethylene glycols, gelatin, carbohydrates such as lactose, amylose or starch, magnesium stearate, talc, silicic acid, viscous paraffin, perfume oil, fatty acid esters, hydroxy methylcellulose, and polyvinyl pyrrolidone, which do not deleteriously react with the active composition.

[0390] The pharmaceutical formulations can be sterilized, and if desired, mixed with auxiliary agents, such as lubricants, preservatives, stabilizers, wetting agents, emulsifiers, salts for influencing osmotic pressure, buffers, coloring, flavoring and/or aromatic substances, and the like which do not deleteriously react with the active composition.

[0391] In addition to an amount of one or more of the polypeptides, polynucleotides, vectors, cells, engineered AAV capsid particles, nanoparticles, other delivery particles, and combinations thereof described herein, the pharmaceutical formulation can also include an effective amount of an auxiliary active agent, including but not limited to, polynucleotides, amino acids, peptides, polypeptides, antibodies, aptamers, ribozymes, hormones, immunomodulators, antipyretics, anxiolytics, antipsychotics, analgesics, antispasmodics, anti-inflammatories, anti-histamines, anti-infectives, chemotherapeutics, and combinations thereof.

[0392] Suitable hormones include, but are not limited to, amino-acid derived hormones (e.g., melatonin and thyroxine), small peptide hormones and protein hormones (e.g., thyrotropin-releasing hormone, vasopressin, insulin, growth hormone, luteinizing hormone, follicle-stimulating hormone, and thyroid-stimulating hormone), eicosanoids (e.g., arachidonic acid, lipoxins, and prostaglandins), and steroid hormones (e.g., estradiol, testosterone, tetrahydro testosterone Cortisol). Suitable immunomodulators include, but are not limited to, prednisone, azathioprine, 6-MP, cyclosporine, tacrolimus, methotrexate, interleukins (e.g., IL-2, IL-7, and IL-12), cytokines (e.g., interferons (e.g., IFN-a, IFN-β, IFN-ε, IFN-K, IFN-ω, and IFN-γ), granulocyte colony-stimulating factor, and imiquimod), chemokines (e.g., CCL3, CCL26 and CXCL7), cytosine phosphate-guanosine, oligodeoxynucleotides, glucans, antibodies, and aptamers).

[0393] Suitable antipyretics include, but are not limited to, non-steroidal anti-inflammatories (e.g., ibuprofen, naproxen, ketoprofen, and nimesulide), aspirin and related salicylates (e.g., choline salicylate, magnesium salicylate, and sodium salicylate), paracetamol/acetaminophen, metamizole, nabumetone, phenazone, and quinine.

[0394] Suitable anxiolytics include, but are not limited to, benzodiazepines (e.g., alprazolam, bromazepam, chlordiazepoxide, clonazepam, clorazepate, diazepam, flurazepam, lorazepam, oxazepam, temazepam, triazolam, and tofisopam), serotonergic antidepressants (e.g., selective serotonin reuptake inhibitors, tricyclic antidepressants, and monoamine oxidase inhibitors), mebicar, fabomotizole, selank, bromantane, emoxypine, azapirones, barbiturates, hydroxyzine, pregabalin, validol, and beta blockers.

[0395] Suitable antipsychotics include, but are not limited to, benperidol, bromoperidol, droperidol, haloperidol, moperone, pipamperone, timiperone, fluspirilene, penfluridol, pimozide, acepromazine, chlorpromazine, cyamemazine, dixyrazine, fluphenazine, levomepromazine, mesoridazine, perazine, pericyazine, perphenazine, pipotiazine, prochlorperazine, promazine, promethazine, prothipendyl, thioproperazine, thioridazine, trifluoperazine, triflupromazine, chlorprothixene, clopenthixol, flupentixol, thiothixene, zuclopenthixol, clotiapine, loxapine, prothipendyl, carpipramine, clocapramine, molindone, mosapramine, sulpiride, veralipride, amisulpride, amoxapine, aripiprazole, asenapine, clozapine, blonanserin, iloperidone, lurasidone, melperone, nemonapride, olanzapine, paliperidone, perospirone, quetiapine, remoxipride, risperidone, sertindole, trimipramine, ziprasidone, zotepine, alstonie, bifeprunox, bitopertin, brexpiprazole, cannabidiol, cariprazine, pimavanserin, pomaglumetad methionil, vabicaserin, xanomeline, and zicronapine.

[0396] Suitable analgesics include, but are not limited to, paracetamol/acetaminophen, nonsteroidal anti-inflammatories (e.g., ibuprofen, naproxen, ketoprofen, and nimesulide), COX-2 inhibitors (e.g., rofecoxib, celecoxib, and etoricoxib), opioids (e.g., morphine, codeine, oxycodone, hydrocodone, dihydromorphine, pethidine, buprenorphine), tramadol, norepinephrine, flupirtine, nefopam, orphenadrine, pregabalin, gabapentin, cyclobenzaprine, scopolamine, methadone, ketobemidone, piritramide, and aspirin and related salicylates (e.g., choline salicylate, magnesium salicylate, and sodium salicylate).

[0397] Suitable antispasmodics include, but are not limited to, mebeverine, papaverine, cyclobenzaprine, carisoprodol, orphenadrine, tizanidine, metaxalone, methocarbamol, chlorzoxazone, baclofen, dantrolene, baclofen, tizanidine, and dantrolene. Suitable anti-inflammatories include, but are not limited to, prednisone, non-steroidal anti-inflammatories (e.g., ibuprofen, naproxen, ketoprofen, and nimesulide), COX-2 inhibitors (e.g., rofecoxib, celecoxib, and etoricoxib), and immune selective anti-inflammatory derivatives (e.g., submandibular gland peptide-T and its derivatives)

[0398] Suitable anti-histamines include, but are not limited to, H1-receptor antagonists (e.g., acrivastine, azelastine, bilastine, brompheniramine, buclizine, bromodiphenhydramine, carbinoxamine, cetirizine, chlorpromazine, cyclizine, chlorpheniramine, clemastine, cyproheptadine, desloratadine, dexbrompheniramine, dexchlorpheniramine, dimenhydrinate, dimetindene, diphenhydramine, doxylamine, ebastine, embramine, fexofenadine, hydroxyzine, levocetirizine, loratadine, meclizine, mirtazapine, olopatadine, orphenadrine, phenindamine, pheniramine, phenyltoloxamine, promethazine, pyrilamine, quetiapine, rupatadine, tripelennamine, and triprolidine), H2-receptor antagonists (e.g., cimetidine, famotidine, lafutidine, nizatidine, ranitidine, and roxatidine), tritoqualine, catechin, cromoglicate, nedocromil, and p2-adrenergic agonists.

[0399] Suitable anti-infectives include, but are not limited to, amebicides (e.g., nitazoxanide, paromomycin, metronidazole, tinidazole, chloroquine, miltefosine, amphotericin b, and iodoquinol), aminoglycosides (e.g., paromomycin, tobramycin, gentamicin, amikacin, kanamycin, and neomycin), anthelmintics (e.g., pyrantel, mebendazole, ivermectin, praziquantel, albendazole, thiabendazole, oxamniquine), antifungals (e.g., azole antifungals (e.g., itraconazole, fluconazole, parconazole, ketoconazole, clotrimazole, miconazole, and voriconazole), echinocandins (e.g., caspofungin, anidulafungin, and micafungin), griseofulvin, terbinafine, flucytosine, and polyenes (e.g., nystatin, and amphotericin b), antimalarial agents (e.g., pyrimethamine/sulfadoxine, artemether/lumefantrine, atovaquone/proguanil, quinine, hydroxychloroquine, mefloquine, chloroquine, doxycycline, pyrimethamine, and halofantrine), antituberculosis agents (e.g., aminosalicylates (e.g., aminosalicylic acid), isoniazid/rifampin, isoniazid/pyrazinamide/rifampin, bedaquiline, isoniazid, ethambutol, rifampin, rifabutin, rifapentine, capreomycin, and cycloserine), antivirals (e.g., amantadine, rimantadine, abacavir/lamivudine, emtricitabine/tenofovir, cobicistat/elvitegravir/emtricitabine/tenofovir, efavirenz/emtricitabine/tenofovir, abacavir/lamivudine/zidovudine, lamivudine/zidovudine, emtricitabine/tenofovir, emtricitabine/lopinavir/ritonavir/tenofovir, interferon alfa-2v/ribavirin, peginterferon alfa-2b, maraviroc, raltegravir, dolutegravir, enfuvirtide, foscamet, fomivirsen, oseltamivir, zanamivir, nevirapine, efavirenz, etravirine, rilpivirine, delavirdine, nevirapine, entecavir, lamivudine, adefovir, sofosbuvir, didanosine, tenofovir, abacavir, zidovudine, stavudine, emtricitabine, zalcitabine, telbivudine, simeprevir, boceprevir, telaprevir, lopinavir/ritonavir, boceprevir, darunavir, ritonavir, tipranavir, atazanavir, nelfinavir, amprenavir, indinavir, saquinavir, ribavirin, valacyclovir, acyclovir, famciclovir, ganciclovir, and valganciclovir), carbapenems (e.g., doripenem, meropenem, ertapenem, and cilastatin/imipenem), cephalosporins (e.g., cefadroxil, cephradine, cefazolin, cephalexin, cefepime, cefazoline, loracarbef, cefotetan, cefuroxime, cefprozil, loracarbef, cefoxitin, cefaclor, ceftibuten, ceftriaxone, cefotaxime, cefpodoxime, cefdinir, cefixime, cefditoren, ceftizoxime, and ceftazidime), glycopeptide antibiotics (e.g., vancomycin, dalbavancin, oritavancin, and telavancin), glycylcyclines (e.g., tigecycline), leprostatics (e.g., clofazimine and thalidomide), lincomycin and derivatives thereof (e.g., clindamycin and lincomycin), macrolides and derivatives thereof (e.g., telithromycin, fidaxomicin, erythromycin, azithromycin, clarithromycin, dirithromycin, and troleandomycin), linezolid, sulfamethoxazole/trimethoprim, rifaximin, chloramphenicol, Fosfomycin, metronidazole, aztreonam, bacitracin, penicillin (amoxicillin, ampicillin, bacampicillin, carbenicillin, piperacillin, ticarcillin, amoxicillin/clavulanate, ampicillin/sulbactam, piperacillin/tazobactam, clavulanate/ticarcillin, penicillin, procaine penicillin, oxacillin, dicloxacillin, and nafcillin), quinolones (e.g., lomefloxacin, norfloxacin, ofloxacin, gatifloxacin, moxifloxacin, ciprofloxacin, levofloxacin, gemifloxacin, moxifloxacin, cinoxacin, nalidixic acid, enoxacin, grepafloxacin, gatifloxacin, trovafloxacin, and sparfloxacin), sulfonamides (e.g., sulfamethoxazole/trimethoprim, sulfasalazine, and sulfisoxazole), tetracyclines (e.g., doxycycline, demeclocycline, minocycline, doxycycline/salicylic acid, doxycycline/omega-3 polyunsaturated fatty acids, and tetracycline), and urinary anti-infectives (e.g., nitrofurantoin, methenamine, Fosfomycin, cinoxacin, nalidixic acid, trimethoprim, and methylene blue).

[0400] Suitable chemotherapeutics include, but are not limited to, paclitaxel, brentuximab vedotin, doxorubicin, 5-FU (fluorouracil), everolimus, pemetrexed, melphalan, pamidronate, anastrozole, exemestane, nelarabine, ofatumumab, bevacizumab, belinostat, tositumomab, carmustine, bleomycin, bosutinib, busulfan, alemtuzumab, irinotecan, vandetanib, bicalutamide, lomustine, daunorubicin, clofarabine, cabozantinib, dactinomycin, ramucirumab, cytarabine, Cytoxan, cyclophosphamide, decitabine, dexamethasone, docetaxel, hydroxyurea, dacarbazine, leuprolide, epirubicin, oxaliplatin, asparaginase, estramustine, cetuximab, vismodegib, asparaginase Erwinia chrysanthemi, amifostine, etoposide, flutamide, toremifene, fulvestrant, letrozole, degarelix, pralatrexate, methotrexate, floxuridine, obinutuzumab, gemcitabine, afatinib, imatinib mesylate, carmustine, eribulin, trastuzumab, altretamine, topotecan, ponatinib, idarubicin, ifosfamide, ibrutinib, axitinib, interferon alfa-2a, gefitinib, romidepsin, ixabepilone, ruxolitinib, cabazitaxel, ado-trastuzumab emtansine, carfilzomib, chlorambucil, sargramostim, cladribine, mitotane, vincristine, procarbazine, megestrol, trametinib, mesna, strontium-89 chloride, mechlorethamine, mitomycin, busulfan, gemtuzumab ozogamicin, vinorelbine, filgrastim, pegfilgrastim, sorafenib, nilutamide, pentostatin, tamoxifen, mitoxantrone, pegaspargase, denileukin diftitox, alitretinoin, carboplatin, pertuzumab, cisplatin, pomalidomide, prednisone, aldesleukin, mercaptopurine, zoledronic acid, lenalidomide, rituximab, octreotide, dasatinib, regorafenib, histrelin, sunitinib, siltuximab, omacetaxine, thioguanine (tioguanine), dabrafenib, erlotinib, bexarotene, temozolomide, thiotepa, thalidomide, Bacillus Calmette-Guerin (BCG), temsirolimus, bendamustine hydrochloride, triptorelin, arsenic trioxide, lapatinib, valrubicin, panitumumab, vinblastine, bortezomib, tretinoin, azacitidine, pazopanib, teniposide, leucovorin, crizotinib, capecitabine, enzalutamide, ipilimumab, goserelin, vorinostat, idelalisib, ceritinib, abiraterone, epothilone, tafluposide, azathioprine, doxifluridine, vindesine, and all-trans retinoic acid.

[0401] In some embodiments where there is an auxiliary active agent contained in the pharmaceutical formulation in addition to the one or more of the polypeptides, polynucleotides, CRISPR-Cas complexes, vectors, cells, virus particles, nanoparticles, other delivery particles, and combinations thereof described herein, amount, such as an effective amount, of the auxiliary active agent will vary depending on the auxiliary active agent. In some embodiments, the amount of the auxiliary active agent ranges from 0.001 micrograms to about 1 milligram. In other embodiments, the amount of the auxiliary active agent ranges from about 0.01 IU to about 1000 IU. In further embodiments, the amount of the auxiliary active agent ranges from 0.001 mL to about 1 mL. In yet other embodiments, the amount of the auxiliary active agent ranges from about 1% w/w to about 50% w/w of the total pharmaceutical formulation. In additional embodiments, the amount of the auxiliary active agent ranges from about 1% v/v to about 50% v/v of the total pharmaceutical formulation. In still other embodiments, the amount of the auxiliary active agent ranges from about 1% w/v to about 50% w/v of the total pharmaceutical formulation.

### Dosage Forms

[0402] In some embodiments, the pharmaceutical formulations described herein may be in a dosage form. The dosage forms can be adapted for administration by any appropriate route. Appropriate routes include, but are not limited to, oral (including buccal or sublingual), rectal, epidural, intracranial, intraocular, inhaled, intranasal, topical (including buccal, sublingual, or transdermal), vaginal, intraurethral, parenteral, intracranial, subcutaneous, intramuscular, intravenous, intraperitoneal, intradermal, intraosseous, intracardiac, intraarticular, intracavemous, intrathecal, intravitreal, intracerebral, gingival, subgingival, intracerebroventricular, and intradermal. Such formulations may be prepared by any method known in the art.

[0403] Dosage forms adapted for oral administration can be discrete dosage units such as capsules, pellets or tablets, powders or granules, solutions, or suspensions in aqueous or non-aqueous liquids; edible foams or whips, or in oil-in-water liquid emulsions or water-in-oil liquid emulsions. In some embodiments, the pharmaceutical formulations adapted for oral administration also include one or more agents which flavor, preserve, color, or help disperse the pharmaceutical formulation. Dosage forms prepared for oral administration can also be in the form of a liquid solution that can be delivered as foam, spray, or liquid solution. In some embodiments, the oral dosage form can contain about 1 ng to 1000 g of a pharmaceutical formulation containing a therapeutically effective amount or an appropriate fraction thereof of the targeted effector fusion protein and/or complex thereof or composition containing the one or more of the polypeptides, polynucleotides, vectors, cells, and combinations thereof described herein. The oral dosage form can be administered to a subject in need thereof.

[0404] Where appropriate, the dosage forms described herein can be microencapsulated.

[0405] The dosage form can also be prepared to prolong or sustain the release of any ingredient. In some embodiments, the one or more of the polypeptides, polynucleotides, vectors, cells, and combinations thereof described herein can be the ingredient whose release is delayed. In other embodiments, the release of an optionally included auxiliary ingredient is delayed. Suitable methods for delaying the release of an ingredient include, but are not limited to, coating or embedding the ingredients in material in polymers, wax, gels, and the like. Delayed release dosage formulations can be prepared as described in standard references such as “Pharmaceutical dosage form tablets,” eds. Liberman et. al. (New York, Marcel Dekker, Inc., 1989), “Remington—The science and practice of pharmacy”, 20th ed., Lippincott Williams & Wilkins, Baltimore, MD, 2000, and “Pharmaceutical dosage forms and drug delivery systems”, 6th Edition, Ansel et al., (Media, PA: Williams and Wilkins, 1995). These references provide information on excipients, materials, equipment, and processes for preparing tablets and capsules and delayed release dosage forms of tablets and pellets, capsules, and granules. The delayed release can be anywhere from about an hour to about 3 months or more.

[0406] Examples of suitable coating materials include, but are not limited to, cellulose polymers such as cellulose acetate phthalate, hydroxypropyl cellulose, hydroxypropyl methylcellulose, hydroxypropyl methylcellulose phthalate, and hydroxypropyl methylcellulose acetate succinate; polyvinyl acetate phthalate, acrylic acid polymers and copolymers, and methacrylic resins that are commercially available under the trade name EUDRAGIT® (Roth Pharma, Westerstadt, Germany), zein, shellac, and polysaccharides.

[0407] Coatings may be formed with a different ratio of water-soluble polymer, water insoluble polymers, and/or pH dependent polymers, with or without water insoluble/water soluble non-polymeric excipient, to produce the desired release profile. The coating is either performed on the dosage form (matrix or simple) which includes, but is not limited to, tablets (compressed with or without coated beads), capsules (with or without coated beads), beads, particle compositions, “ingredient as is” formulated as, but not limited to, suspension form or as a sprinkle dosage form.

[0408] Dosage forms adapted for topical administration can be formulated as ointments, creams, suspensions, lotions, powders, solutions, pastes, gels, sprays, aerosols, or oils. In some embodiments for treatments of the eye or other external tissues, for example the mouth or the skin, the pharmaceutical formulations are applied as a topical ointment or cream. When formulated in an ointment, the one or more of the polypeptides, polynucleotides, vectors, cells, and combinations thereof described herein can be formulated with a paraffinic or water-miscible ointment base. In some embodiments, the active ingredient can be formulated in a cream with an oil-in-water cream base or a water-in-oil base. Dosage forms adapted for topical administration in the mouth include lozenges, pastilles, and mouth washes.

[0409] Dosage forms adapted for nasal or inhalation administration include aerosols, solutions, suspension drops, gels, or dry powders. In some embodiments, the one or more of the polypeptides, polynucleotides, vectors, cells, and combinations thereof described herein is contained in a dosage form adapted for inhalation is in a particle-size-reduced form that is obtained or obtainable by micronization. In some embodiments, the particle size of the size reduced (e.g., micronized) compound or salt or solvate thereof, is defined by a D50 value of about 0.5 to about 10 microns as measured by an appropriate method known in the art. Dosage forms adapted for administration by inhalation also include particle dusts or mists. Suitable dosage forms wherein the carrier or excipient is a liquid for administration as a nasal spray or drops include aqueous or oil solutions/suspensions of an active ingredient (e.g., the one or more of the polypeptides, polynucleotides, vectors, cells, and combinations thereof described herein and/or auxiliary active agent), which may be generated by various types of metered dose pressurized aerosols, nebulizers, or insufflators.

[0410] In some embodiments, the dosage forms can be aerosol formulations suitable for administration by inhalation. In some of these embodiments, the aerosol formulation can contain a solution or fine suspension of the one or more of the polypeptides, polynucleotides, vectors, cells, and combinations thereof described herein and a pharmaceutically acceptable aqueous or non-aqueous solvent. Aerosol formulations can be presented in single or multi-dose quantities in sterile form in a sealed container. For some of these embodiments, the sealed container is a single dose or multi-dose nasal, or an aerosol dispenser fitted with a metering valve (e.g., metered dose inhaler), which is intended for disposal once the contents of the container have been exhausted.

[0411] Where the aerosol dosage form is contained in an aerosol dispenser, the dispenser contains a suitable propellant under pressure, such as compressed air, carbon dioxide, or an organic propellant, including but not limited to a hydrofluorocarbon. The aerosol formulation dosage forms in other embodiments are contained in a pump-atomizer. The pressurized aerosol formulation can also contain a solution or a suspension of one or more of the polypeptides, polynucleotides, vectors, cells, and combinations thereof described herein. In further embodiments, the aerosol formulation can also contain co-solvents and/or modifiers incorporated to improve, for example, the stability and/or taste and/or fine particle mass characteristics (amount and/or profile) of the formulation. Administration of the aerosol formulation can be once daily or several times daily, for example 2, 3, 4, or 8 times daily, in which 1, 2, or 3 doses are delivered each time.

[0412] For some dosage forms suitable and/or adapted for inhaled administration, the pharmaceutical formulation is a dry powder inhalable formulation. In addition to the one or more of the polypeptides, polynucleotides, vectors, cells, and combinations thereof described herein, an auxiliary active ingredient, and/or pharmaceutically acceptable salt thereof, such a dosage form can contain a powder base such as lactose, glucose, trehalose, mannitol, and/or starch. In some of these embodiments, the one or more of the polypeptides, polynucleotides, vectors, cells, and combinations thereof described herein is in a particle-size reduced form. In further embodiments, a performance modifier, such as L-leucine or another amino acid, cellobiose octaacetate, and/or metals salts of stearic acid, such as magnesium or calcium stearate.

[0413] In some embodiments, the aerosol dosage forms can be arranged so that each metered dose of aerosol contains a predetermined amount of an active ingredient, such as the one or more of the one or more of the polypeptides, polynucleotides, vectors, cells, and combinations thereof described herein.

[0414] Dosage forms adapted for vaginal administration can be presented as pessaries, tampons, creams, gels, pastes, foams, or spray formulations. Dosage forms adapted for rectal administration include suppositories or enemas.

[0415] Dosage forms adapted for parenteral administration and/or adapted for any type of injection (e.g. intravenous, intraperitoneal, subcutaneous, intramuscular, intradermal, intraosseous, epidural, intracardiac, intraarticular, intracavemous, gingival, subgingival, intrathecal, intravitreal, intracerebral, and intracerebroventricular) can include aqueous and/or non-aqueous sterile injection solutions, which can contain anti-oxidants, buffers, bacteriostats, solutes that render the composition isotonic with the blood of the subject, and aqueous and non-aqueous sterile suspensions, which can include suspending agents and thickening agents. The dosage forms adapted for parenteral administration can be presented in a single-unit dose or multi-unit dose containers, including but not limited to sealed ampoules or vials. The doses can be lyophilized and resuspended in a sterile carrier to reconstitute the dose prior to administration. Extemporaneous injection solutions and suspensions can be prepared in some embodiments, from sterile powders, granules, and tablets.

[0416] Dosage forms adapted for ocular administration can include aqueous and/or nonaqueous sterile solutions that can optionally be adapted for injection, and which can optionally contain anti-oxidants, buffers, bacteriostats, solutes that render the composition isotonic with the eye or fluid contained therein or around the eye of the subject, and aqueous and nonaqueous sterile suspensions, which can include suspending agents and thickening agents.

[0417] For some embodiments, the dosage form contains a predetermined amount of the one or more of the polypeptides, polynucleotides, vectors, cells, and combinations thereof described herein per unit dose. In some embodiments, the predetermined amount of the unit doses may therefore be administered once or more than once a day. Such pharmaceutical formulations may be prepared by any of the methods well known in the art.

### Kits

[0418] Also described herein are kits that contain one or more of the one or more of the compositions, polypeptides, polynucleotides, vectors, cells, or other components described herein and combinations thereof and pharmaceutical formulations described herein. In embodiments, one or more of the polypeptides, polynucleotides, vectors, cells, and combinations thereof described herein can be presented as a combination kit. As used herein, the terms “combination kit” or “kit of parts” refers to the compounds, or formulations and additional components that are used to package, screen, test, sell, market, deliver, and/or administer the combination of elements or a single element, such as the active ingredient, contained therein. Such additional components include but are not limited to, packaging, syringes, blister packages, bottles, and the like. The combination kit can contain one or more of the components (e.g., one or more of the one or more of the polypeptides, polynucleotides, vectors, cells, and combinations thereof) or formulation thereof can be provided in a single formulation (e.g., a liquid, lyophilized powder, etc.), or in separate formulations. The separate components or formulations can be contained in a single package or in separate packages within the kit. The kit can also include instructions in a tangible medium of expression that can contain information and/or directions regarding the content of the components and/or formulations contained therein, safety information regarding the content of the components(s) and/or formulation(s) contained therein, information regarding the amounts, dosages, indications for use, screening methods, component design recommendations and/or information, recommended treatment regimen(s) for the components(s) and/or formulations contained therein. As used herein, “tangible medium of expression” refers to a medium that is physically tangible or accessible and is not a mere abstract thought or an unrecorded spoken word. “Tangible medium of expression” includes, but is not limited to, words on a cellulosic or plastic material, or data stored in a suitable computer readable memory form. The data can be stored on a unit device, such as a flash memory drive or CD-ROM or on a server that can be accessed by a user via, e.g., a web interface.

[0419] In one embodiment, the invention provides a kit comprising one or more of the components described herein. In some embodiments, the kit comprises a vector system and instructions for using the kit. In some embodiments, the vector system includes a regulatory element operably linked to one or more engineered polynucleotides, such as those containing a hematopoietic cell-specific targeting moiety, as described elsewhere herein and, optionally, a cargo molecule, which can optionally be operably linked to a regulatory element. The one or more engineered polynucleotides such as those containing a hematopoietic cell-specific targeting moiety, as described elsewhere herein and, can be included on the same or different vectors as the cargo molecule in embodiments containing a cargo molecule within the kit.

[0420] In some embodiments, the kit comprises a vector system and instructions for using the kit. In some embodiments, the vector system comprises (a) a first regulatory element operably linked to a direct repeat sequence and one or more insertion sites for inserting one or more guide sequences up- or downstream (whichever applicable) of the direct repeat sequence, wherein when expressed, the guide sequence directs sequence-specific binding of a Cas9 CRISPR complex to a target sequence in a eukaryotic cell, wherein the Cas9 CRISPR complex comprises a Cas9 enzyme complexed with the guide sequence that is hybridized to the target sequence; and/or (b) a second regulatory element operably linked to an enzyme-coding sequence encoding said Cas9 enzyme comprising a nuclear localization sequence. Where applicable, a tracr sequence may also be provided. In some embodiments, the kit comprises components (a) and (b) located on the same or different vectors of the system. In some embodiments, component (a) further comprises two or more guide sequences operably linked to the first regulatory element, wherein when expressed, each of the two or more guide sequences direct sequence specific binding of a CRISPR complex to a different target sequence in a eukaryotic cell. In some embodiments, the Cas9 enzyme comprises one or more nuclear localization sequences of sufficient strength to drive accumulation of said CRISPR enzyme in a detectable amount in the nucleus of a eukaryotic cell. In some embodiments, the CRISPR enzyme is a type V or VI CRISPR system enzyme. In some embodiments, the CRISPR enzyme is a Cas9 enzyme. In some embodiments, the Cas9 enzyme is derived from Francisella tularensis 1, Francisella tularensis subsp. novicida, Prevotella albensis, Lachnospiraceae bacterium MC2017 1, Butyrivibrio proteoclasticus, Peregrinibacteria bacterium GW2011_GWA2_33_10, Parcubacteria bacterium GW2011_GWC2_44_17, Smithella sp. SCADC, Acidaminococcus sp. BV3L6, Lachnospiraceae bacterium MA2020, Candidatus Methanoplasma termitum, Eubacterium eligens, Moraxella bovoculi 237, Leptospira inadai, Lachnospiraceae bacterium ND2006, Porphyromonas crevioricanis 3, Prevotella disiens, or Porphyromonas macacae Cas9 (e.g., modified to have or be associated with at least one DD), and may include further alteration or mutation of the Cas9, and can be a chimeric Cas9. In some embodiments, the DD-CRISPR enzyme is codon-optimized for expression in a eukaryotic cell. In some embodiments, the DD-CRISPR enzyme directs cleavage of one or two strands at the location of the target sequence In some embodiments, the DD-CRISPR enzyme lacks or substantially DNA strand cleavage activity (e.g., no more than 5% nuclease activity as compared with a wild-type enzyme or enzyme not having the mutation or alteration that decreases nuclease activity). In some embodiments, the first regulatory element is a polymerase III promoter. In some embodiments, the second regulatory element is a polymerase II promoter. In some embodiments, the guide sequence is at least 16, 17, 18, 19, 20, 25 nucleotides, or between 16-30, or between 16-25, or between 16-20 nucleotides in length.

### Methods of Use

### General Discussion

[0421] The compositions including one or more of the hematopoietic cell-specific targeting moieties, engineered or variant AAV capsid system polynucleotides, polypeptides, vector(s), engineered cells, engineered or variant AAV capsid particles can be used generally to package and/or deliver one or more cargos to a recipient cell. In some embodiments, delivery is done in cell-specific manner based upon the specificity of the targeting moiety. In some embodiments this is conferred by the tropism of the engineered AAV capsid, which can be influenced at least in part by the inclusion of one or n-mer motifs described elsewhere herein. In some embodiments, compositions including one or more of the hematopoietic cell-specific targeting moieties, engineered AAV capsid particles, can be administered to a subject or a cell, tissue, and/or organ and facilitate the transfer and/or integration of the cargo to the recipient cell. In other embodiments, engineered cells capable of producing compositions, such as polypeptides and other particles (e.g., engineered AAV capsids and viral particles), containing one or more of the hematopoietic cell-specific targeting moieties can be generated from the polynucleotides, vectors, and vector systems etc., described herein. This includes without limitation, the engineered AAV capsid system molecules (e.g., polynucleotides, vectors, and vector systems, etc.). In some embodiments, the polynucleotides, vectors, and vector systems etc., described herein capable of generating the compositions, such as polypeptides and other particles (e.g., engineered AAV capsids and viral particles), containing one or more of the hematopoietic cell-specific targeting moieties can be delivered to a cell or tissue, in vivo, ex vivo, or in vitro. In some embodiments, when delivered to a subject, the composition can transform a subject's cell in vivo or ex vivo to produce an engineered cell that can be capable of making a composition described herein that contains one or more of the hematopoietic cell-specific targeting moieties described herein, including but not limited to the engineered or variant AAV capsid particles, which can be released from the engineered cell and deliver cargo molecule(s) to a recipient cell in vivo or produce personalized engineered compositions (e.g., AAV capsid particles) for reintroduction into the subject from which the recipient cell was obtained.

[0422] In some embodiments, an engineered cell can be delivered to a subject, where it can release produced compositions of the present invention (including but not limited to engineered AAV capsid particles) such that they can then deliver a cargo (e.g., a cargo polynucleotide(s)) to a recipient cell. These general processes can be used in a variety of ways to treat and/or prevent disease or a symptom thereof in a subject, generate model cells, generate modified organisms, provide cell selection and screening assays, in bioproduction, and in other various applications.

[0423] In some embodiments, the compositions, such as polypeptides and other particles (e.g., engineered AAV capsids and viral particles), containing one or more of the hematopoietic cell-specific targeting moieties) can be delivered to a subject or a cell, tissue, and/or organ. In this way they can be used to deliver any cargo they may contain or are associated with a hematopoietic or blood cell.

[0424] In some embodiments, the engineered AAV capsid polynucleotides, vectors, and systems thereof can be used to generate engineered AAV capsid variant libraries that can be mined for variants with a desired cell-specificity. The description provided herein can demonstrate that one having a desired cell-specificity in mind could utilize the present invention as described herein to obtain a capsid with the desired cell-specificity.

[0425] The subject invention may be used as part of a research program wherein there is transmission of results or data. A computer system (or digital device) may be used to receive, transmit, display and/or store results, analyze the data and/or results, and/or produce a report of the results and/or data and/or analysis. A computer system may be understood as a logical apparatus that can read instructions from media (e.g., software) and/or network port (e.g., from the internet), which can optionally be connected to a server having fixed media. A computer system may comprise one or more of a CPU, disk drives, input devices such as keyboard and/or mouse, and a display (e.g., a monitor). Data communication, such as transmission of instructions or reports, can be achieved through a communication medium to a server at a local or a remote location. The communication medium can include any means of transmitting and/or receiving data. For example, the communication medium can be a network connection, a wireless connection, or an internet connection. Such a connection can provide for communication over the World Wide Web. It is envisioned that data relating to the present invention can be transmitted over such networks or connections (or any other suitable means for transmitting information, including but not limited to mailing a physical report, such as a print-out) for reception and/or for review by a receiver. The receiver can be but is not limited to an individual, or electronic system (e.g., one or more computers, and/or one or more servers). In some embodiments, the computer system comprises one or more processors. Processors may be associated with one or more controllers, calculation units, and/or other units of a computer system, or implanted in firmware as desired. If implemented in software, the routines may be stored in any computer readable memory such as in RAM, ROM, flash memory, a magnetic disk, a laser disk, or other suitable storage medium. Likewise, this software may be delivered to a computing device via any known delivery method including, for example, over a communication channel such as a telephone line, the internet, a wireless connection, etc., or via a transportable medium, such as a computer readable disk, flash drive, etc. The various steps may be implemented as various blocks, operations, tools, modules and techniques which, in turn, may be implemented in hardware, firmware, software, or any combination of hardware, firmware, and/or software. When implemented in hardware, some or all of the blocks, operations, techniques, etc. may be implemented in, for example, a custom integrated circuit (IC), an application specific integrated circuit (ASIC), a field programmable logic array (FPGA), a programmable logic array (PLA), etc. A client-server, relational database architecture can be used in embodiments of the invention. A client-server architecture is a network architecture in which each computer or process on the network is either a client or a server. Server computers are typically powerful computers dedicated to managing disk drives (file servers), printers (print servers), or network traffic (network servers). Client computers include PCs (personal computers) or workstations on which users run applications, as well as example output devices as disclosed herein. Client computers rely on server computers for resources, such as files, devices, and even processing power. In some embodiments of the invention, the server computer handles all of the database functionality. The client computer can have software that handles all the front-end data management and can also receive data input from users. A machine readable medium comprising computer-executable code may take many forms, including but not limited to, a tangible storage medium, a carrier wave medium or physical transmission medium. Non-volatile storage media include, for example, optical or magnetic disks, such as any of the storage devices in any computer(s) or the like, such as may be used to implement the databases, etc. shown in the drawings. Volatile storage media include dynamic memory, such as main memory of such a computer platform. Tangible transmission media include coaxial cables; copper wire and fiber optics, including the wires that comprise a bus within a computer system. Carrier-wave transmission media may take the form of electric or electromagnetic signals, or acoustic or light waves such as those generated during radio frequency (RF) and infrared (IR) data communications. Common forms of computer-readable media therefore include for example: a floppy disk, a flexible disk, hard disk, magnetic tape, any other magnetic medium, a CD-ROM, DVD or DVD-ROM, any other optical medium, punch cards paper tape, any other physical storage medium with patterns of holes, a RAM, a ROM, a PROM and EPROM, a FLASH-EPROM, any other memory chip or cartridge, a carrier wave transporting data or instructions, cables or links transporting such a carrier wave, or any other medium from which a computer may read programming code and/or data. Many of these forms of computer readable media may be involved in carrying one or more sequences of one or more instructions to a processor for execution. Accordingly, the invention comprehends performing any method herein-discussed and storing and/or transmitting data and/or results therefrom and/or analysis thereof, as well as products from performing any method herein-discussed, including intermediates.

### Therapeutics

[0426] In some embodiments, the compositions containing one or more of the hematopoietic cell-specific targeting moieties described herein, including, but not limited to the engineered or variant AAV capsid particles, engineered cells, and/or formulations thereof described herein can be delivered to a subject in need thereof as a therapy for one or more diseases. In some embodiments, the disease to be treated is a genetic or epigenetic based disease. In some embodiments, the disease to be treated is not a genetic or epigenetic based disease. In some embodiments, the disease to be treated is a blood disease or disorder. In some embodiments, the compositions containing one or more of the hematopoietic cell-specific targeting moieties described herein, including, but not limited to, the engineered AAV capsid particles, engineered cells, and/or formulations thereof described herein can be delivered to a subject in need thereof as a treatment or prevention (or as a part of a treatment or prevention) of a disease. It will be appreciated that the specific disease to be treated and/or prevented by delivery of a composition, formulation, cell and the like of the present invention, can be dependent on the cargo coupled to, attached to, contained in, or otherwise associated with the composition, formulation, cell and the like of the present invention.

[0427] Genetic diseases that can be treated are discussed in greater detail elsewhere herein (see e.g., discussion on Gene-modification based-therapies below). Other diseases include, but are not limited to, any of the following: cancer, Acinetobacter infections, actinomycosis, African sleeping sickness, AIDS/HIV, amoebiasis, Anaplasmosis, Angiostrongyliasis, Anisakiasis, Anthrax, Arcanobacterium haemolyticum infection, Argentine hemorrhagic fever, Ascariasis, Aspergillosis, Astrovirus infection, Babesiosis, Bacterial meningitis, Bacterial pneumonia, Bacterial vaginosis, Bacteroides infection, balantidiasis, Bartonellosis, Baylisascaris infection, BK virus infection, Black Piedra, Blastocytosis, Blastomycosis, Bolivian hemorrhagic fever, Botulism, Brazilian hemorrhagic fever, brucellosis, Bubonic plague, Burkholderia infection, buruli ulcer, calicivirus invention, campylobacteriosis, Candidiasis, Capillariasis, Carrion's disease, Cat-scratch disease, cellulitis, Chagas Disease, Chancroid, Chickenpox, Chikungunya, Chlamydia, Chlamydia pneumoniae, Cholera, Chromoblastomycosis, Chytridiomycosis, Clonorchiasis, Clostridium difficile colitis, Coccidioidomycosis, Colorado tick fever, rhinovirus/coronavirus infection (common cold), Creutzfeldt-Jakob disease, Crimean-congo hemorrhagic fever, Cryptococcosis, Cryptosporidiosis, Cutaneous larva migrans (CLM), cyclosporiasis, cysticercosis, cytomegalovirus infection, Dengue fever, Desmodesmus infection, Dientamoebiasis, Diphtheria, Diphyllobothriasis, Dracunculiasis, Ebola, Echinococcosis, Ehrlichiosis, Enterobiasis, Enterococcus infection, Enterovirus infection, Epidemic typhus, Erythema Infectiosum, Exanthem subitum, Fascioliasis, Fasciolopsiasis, fatal familial insomnia, filariasis, Clostridium perfringens infection, Fusobacterium infection, Gas gangrene (clostridial myonecrosis), geotrichosis, Gerstmann-Straussler-Scheinker syndrome, Giardiasis, Glanders, Gnathostomiasis, Gonorrhea, Granuloma inguinale, Group A streptococcal infection, Group B streptococcal infection, Haemophilus influenzae infection, Hand, foot, and mouth disease, hantavirus pulmonary syndrome, heartland virus disease, Helicobacter pylori infection, hemorrhagic fever with renal syndrome, Hendra virus infection, Hepatitis (all groups A, B, C, D, E), herpes simplex, histoplasmosis, hookworm infection, human bocavirus infection, human ewingii ehrlichiosis, Human granulocytic anaplasmosis, human metapneumovirus infection, human monocytic ehrlichiosis, human papilloma virus, Hymenolepiasis, Epstein-Barr infection, mononucleosis, influenza, isosporiasis, Kawasaki disease, Kingella kingae infection, Kuru, Lassa fever, Legionellosis (Legionnaires disease and Potomac Fever), Leishmaniasis, Leprosy, Leptospirosis, Listeriosis, Lyme disease, lymphatic filariasis, lymphocytic choriomeningitis, Malaria, Marburg hemorrhagic fever, measles, Middle East respiratory syndrome, Melioidosis, meningitis, Meningococcal disease, Metagonimiasis, Microsporidosis, Molluscum contagiosum, Monkeypox, Mumps, Murine typhus, Mycoplasma pneumonia, Mycoplasma genitalium infection, Mycetoma, Myiasis, Conjunctivitis, Nipah virus infection, Norovirus, Variant Creutzfeldt-Jakob disease, Nocardiosis, Onchocerciasis. Opisthorchiasis, Paracoccidioidomycosis, Paragonimiasis, Pasteurellosis, Pediculosisi capitis, Pediculosis corporis, Pediculosis pubis, pelvic inflammatory disease, pertussis, plague, pneumococcal infection, pneumocystis pneumonia, pneumonia, poliomyelitis, prevotella infection, primary amoebic menigoencephalitis, progressive multifocal leukoencephalopathy, Psittacosis, Q fever, rabies, relapsing fever, respiratory syncytial virus infection, rhinovirus infection, rickettsial infection, Rickettsialpox, Rift Valley Fever, Rocky Mountain Spotted Fever, Rotavirus infection, Rubella, Salmonellosis, SARS, Scabies, Scarlet fever, Schistosomiasis, sepsis, Shigellosis, Shingles, Smallpox, Sporotrichosis, Staphylococcal infection (including MRSA), strongyloidiasis, subacute sclerosing panencephalitis, Syphilis, Taeniasis, tetanus, Trichophyton species infection, Toxocariasis, Toxoplasmosis, Trachoma, Trichinosis, Trichiniasis, Tuberculosis, Tularemia, Typhoid Fever, Typhus Fever, Ureaplasma urealyticum infection, Valley fever, Venezuelan equine encephalitis, Venezuelan hemorrhagic fever, Vibrio species infection, Viral pneumonia, West Nile Fever, White Piedra, Yersinia pseudotuberculosis, Yersiniosis, Yellow fever, Zeaspora, Zika fever, Zygomycosis and combinations thereof.

[0428] Other diseases and disorders that can be treated using embodiments of the present invention include, but are not limited to, endocrine diseases (e.g., Type I and Type II diabetes, gestational diabetes, hypoglycemia. Glucagonoma, Goiter, Hyperthyroidism, hypothyroidism, thyroiditis, thyroid cancer, thyroid hormone resistance, parathyroid gland disorders, Osteoporosis, osteitis deformans, rickets, osteomalacia, hypopituitarism, pituitary tumors, etc.), skin conditions of infections and non-infectious origin, eye diseases of infectious or non-infectious origin, gastrointestinal disorders of infectious or non-infectious origin, cardiovascular diseases of infectious or non-infectious origin, brain and neuron diseases of infectious or non-infectious origin, nervous system diseases of infectious or non-infectious origin, muscle diseases of infectious or non-infectious origin, bone diseases of infectious or non-infectious origin, reproductive system diseases of infectious or non-infectious origin, renal system diseases of infectious or non-infectious origin, blood diseases of infectious or non-infectious origin, lymphatic system diseases of infectious or non-infectious origin, immune system diseases of infectious or non-infectious origin, mental-illness of infectious or non-infectious origin and the like. In some embodiments, the disease to be treated is a hematopoietic cell or hematopoietic cell related disease or disorder.

[0429] Other diseases and disorders will be appreciated by those of skill in the art.

### Adoptive Cell Therapies

[0430] Generally speaking, adoptive cell transfer involves the transfer of cells (autologous, allogeneic, and/or xenogeneic) to a subject. The cells may or may not be modified and/or otherwise manipulated prior to delivery to the subject.

[0431] In some embodiments, an engineered cell as described herein can be included in an adoptive cell transfer therapy. In some embodiments, an engineered cell as described herein can be delivered to a subject in need thereof. In some embodiments, the cell can be isolated from a subject, manipulated in vitro such that it contains and/or is capable of generating a composition of the present invention containing a muscle-specific targeting moiety described elsewhere herein (including but not limited to an engineered AAV capsid particle) described herein to produce an engineered cell and delivered back to the subject in an autologous manner or to a different subject in an allogeneic or xenogeneic manner. The cell isolated, manipulated, and/or delivered can be a eukaryotic cell. The cell isolated, manipulated, and/or delivered can be a stem cell. The cell isolated, manipulated, and/or delivered can be a differentiated cell. The cell isolated, manipulated, and/or delivered can be an immune cell, a blood cell, a stromal cell, an endocrine cell, a renal cell, an exocrine cell, a nervous system cell, a vascular cell, a muscle cell, a urinary system cell, a bone cell, a soft tissue cell, a cardiac cell, a neuron, or an integumentary system cell. Other specific cell types will instantly be appreciated by one of ordinary skill in the art.

[0432] In some embodiments, the isolated cell can be manipulated such that it becomes an engineered cell as described elsewhere herein (e.g., contain and/or express one or more engineered delivery system molecules or vectors described elsewhere herein). Methods of making such engineered cells are described in greater detail elsewhere herein.

[0433] The administration of the cells or population of cells according to the present invention may be carried out in any convenient manner, including by aerosol inhalation, injection, ingestion, transfusion, implantation or transplantation. The cells or population of cells may be administered to a patient subcutaneously, intradermally, intratumorally, intranodally, intramedullary, intramuscularly, by intravenous or intralymphatic injection, or intraperitoneally. In one embodiment, the cell compositions of the present invention are preferably administered by intravenous injection.

[0434] The administration of the cells or population of cells can be or involve the administration of 10⁴-10⁹ cells per kg body weight including all integer values of cell numbers within those ranges. In some embodiments, 10⁵ to 10⁶ cells/kg are delivered Dosing in adoptive cell therapies may for example involve administration of from 10⁶ to 10⁹ cells/kg, with or without a course of lymphodepletion, for example with cyclophosphamide. The cells or population of cells can be administrated in one or more doses. In another embodiment, the effective amount of cells are administrated as a single dose. In another embodiment, the effective amount of cells are administrated as more than one dose over a period time. Timing of administration is within the judgment of managing physician and depends on the clinical condition of the patient. The cells or population of cells may be obtained from any source, such as a blood bank or a donor. While individual needs vary, determination of optimal ranges of effective amounts of a given cell type for a particular disease or conditions are within the skill of one in the art. An effective amount means an amount which provides a therapeutic or prophylactic benefit. The dosage administrated will be dependent upon the age, health and weight of the recipient, kind of concurrent treatment, if any, frequency of treatment and the nature of the effect desired.

[0435] In another embodiment, the effective amount of cells or composition comprising those cells are administrated parenterally. The administration can be an intravenous administration. The administration can be directly done by injection within a tissue. In some embodiments, the tissue can be a tumor.

[0436] To guard against possible adverse reactions, engineered cells can be equipped with a transgenic safety switch, in the form of a transgene that renders the cells vulnerable to exposure to a specific signal. For example, the herpes simplex viral thymidine kinase (TK) gene may be used in this way, for example by introduction into the engineered cell similar to that discussed in Greco, et al., Improving the safety of cell therapy with the TK-suicide gene. Front. Pharmacol. 2015; 6: 95. In such cells, administration of a nucleoside prodrug such as ganciclovir or acyclovir causes cell death. Alternative safety switch constructs include inducible caspase 9, for example triggered by administration of a small-molecule dimerizer that brings together two nonfunctional icasp9 molecules to form the active enzyme. A wide variety of alternative approaches to implementing cellular proliferation controls have been described (see U.S. Patent Publication No. 20130071414; PCT Patent Publication WO2011146862; PCT Patent Publication WO2014011987; PCT Patent Publication WO2013040371; Zhou et al. BLOOD, 2014, 123/25:3895-3905; Di Stasi et al., The New England Journal of Medicine 2011; 365:1673-1683; Sadelain M, The New England Journal of Medicine 2011; 365:1735-173; Ramos et al., Stem Cells 28(6):1107-15 (2010)).

[0437] Methods of modifying isolated cells to obtain the engineered cells with the desired properties are described elsewhere herein. In some embodiments, the methods can include genome modification, including, but not limited to, genome editing using a CRISPR-Cas system to modify the cell. This can be in addition to introduction of an engineered AAV capsid system molecule describe elsewhere herein.

[0438] Allogeneic cells are rapidly rejected by the host immune system. It has been demonstrated that, allogeneic leukocytes present in non-irradiated blood products will persist for no more than 5 to 6 days (Boni, Muranski et al. 2008 Blood 1; 112(12):4746-54). Thus, to prevent rejection of allogeneic cells, the host's immune system usually has to be suppressed to some extent. However, in the case of adoptive cell transfer the use of immunosuppressive drugs also have a detrimental effect on the introduced therapeutic cells, such as engineered cells described herein. Therefore, to effectively use an adoptive immunotherapy approach in these conditions, the introduced cells would need to be resistant to the immunosuppressive treatment. Thus, in a particular embodiment, the present invention further comprises a step of modifying the engineered cells to make them resistant to an immunosuppressive agent, preferably by inactivating at least one gene encoding a target for an immunosuppressive agent. An immunosuppressive agent is an agent that suppresses immune function by one of several mechanisms of action. An immunosuppressive agent can be, but is not limited to a calcineurin inhibitor, a target of rapamycin, an interleukin-2 receptor α-chain blocker, an inhibitor of inosine monophosphate dehydrogenase, an inhibitor of dihydrofolic acid reductase, a corticosteroid or an immunosuppressive antimetabolite. The present invention allows conferring immunosuppressive resistance to engineered cells for adoptive cell therapy by inactivating the target of the immunosuppressive agent in engineered cells. As non-limiting examples, targets for an immunosuppressive agent can be a receptor for an immunosuppressive agent such as: CD52, glucocorticoid receptor (GR), a FKBP family gene member and a cyclophilin family gene member.

[0439] Immune checkpoints are inhibitory pathways that slow down or stop immune reactions and prevent excessive tissue damage from uncontrolled activity of immune cells. In certain embodiments, the immune checkpoint targeted is the programmed death-1 (PD-1 or CD279) gene (PDCD1). In other embodiments, the immune checkpoint targeted is cytotoxic T-lymphocyte-associated antigen (CTLA-4). In additional embodiments, the immune checkpoint targeted is another member of the CD28 and CTLA4 Ig superfamily such as BTLA, LAG3, ICOS, PDL1 or KIR. In further additional embodiments, the immune checkpoint targeted is a member of the TNFR superfamily such as CD40, OX40, CD137, GITR, CD27 or TIM-3.

[0440] Additional immune checkpoints include Src homology 2 domain-containing protein tyrosine phosphatase 1 (SHP-1) (Watson H A, et al., SHP-1: the next checkpoint target for cancer immunotherapy? Biochem Soc Trans. 2016 Apr. 15; 44(2):356-62). SHP-1 is a widely expressed inhibitory protein tyrosine phosphatase (PTP). In T-cells, it is a negative regulator of antigen-dependent activation and proliferation. It is a cytosolic protein, and therefore not amenable to antibody-mediated therapies, but its role in activation and proliferation makes it an attractive target for genetic manipulation in adoptive transfer strategies, such as chimeric antigen receptor (CAR) T cells. Immune checkpoints may also include T cell immunoreceptor with Ig and ITIM domains (TIGIT/Vstm3/WUCAM/VSIG9) and VISTA (Le Mercier I, et al., (2015) Beyond CTLA-4 and PD-1, the generation Z of negative checkpoint regulators. Front. Immunol. 6:418).

[0441] WO2014172606 relates to the use of MTl and/or MT1 inhibitors to increase proliferation and/or activity of exhausted CD8+ T-cells and to decrease CD8+ T-cell exhaustion (e.g., decrease functionally exhausted or unresponsive CD8+ immune cells). In certain embodiments, metallothioneins are targeted by gene editing in adoptively transferred T cells.

[0442] In certain embodiments, targets of gene editing may be at least one targeted locus involved in the expression of an immune checkpoint protein. Such targets may include, but are not limited to CTLA4, PPP2CA, PPP2CB, PTPN6, PTPN22, PDCD1, ICOS (CD278), PDL1, KIR, LAG3, HAVCR2, BTLA, CD160, TIGIT, CD96, CRTAM, LAIRI, SIGLEC7, SIGLEC9, CD244 (2B4), TNFRSF10B, TNFRSF10A, CASP8, CASP10, CASP3, CASP6, CASP7, FADD, FAS, TGFBRII, TGFRBRI, SMAD2, SMAD3, SMAD4, SMAD10, SKI, SKIL, TGIF1, IL10RA, IL10RB, HMOX2, IL6R, IL6ST, EIF2AK4, CSK, PAG1, SIT1, FOXP3, PRDM1, BATF, VISTA, GUCY1A2, GUCY1A3, GUCYlB2, GUCYlB3, MT1, MT2, CD40, OX40, CD137, GITR, CD27, SHP-1 or TIM-3. In some embodiments, the gene locus involved in the expression of PD-1 or CTLA-4 genes is targeted. In some embodiments, combinations of genes are targeted, such as but not limited to PD-1 and TIGIT.

[0443] In some embodiments, at least two genes are edited. Pairs of genes may include, but are not limited to PD1 and TCRα, PD1 and TCRβ, CTLA-4 and TCRα, CTLA-4 and TCRβ, LAG3 and TCRα, LAG3 and TCRβ, Tim3 and TCRα, Tim3 and TCRβ, BTLA and TCRα, BTLA and TCRβ, BY55 and TCRα, BY55 and TCRβ, TIGIT and TCRα, TIGIT and TCRβ, B7H5 and TCRα, B7H5 and TCRβ, LAIR1 and TCRα, LAIR1 and TCRβ, SIGLEC10 and TCRα, SIGLEC10 and TCRβ, 2B4 and TCRα, 2B4 and TCRβ.

[0444] Whether prior to or after genetic or other modification of the engineered cells (such as engineered T cells (e.g., the isolated cell is a T cell), the engineered cells can be activated and expanded generally using methods as described, for example, in U.S. Pat. Nos. 6,352,694; 6,534,055; 6,905,680; 5,858,358; 6,887,466; 6,905,681; 7,144,575; 7,232,566; 7,175,843; 5,883,223; 6,905,874; 6,797,514; 6,867,041; and 7,572,631. The engineered cells can be expanded in vitro or in vivo.

[0445] In some embodiments, the method comprises editing the engineered cells ex vivo by a suitable gene modification method described elsewhere herein (e.g., gene editing via a CRISPR-Cas system) to eliminate potential alloreactive TCRs or other receptors to allow allogeneic adoptive transfer. In some embodiments, T cells are edited ex vivo by a CRISPR-Cas system or other suitable genome modification technique to knock-out or knock-down an endogenous gene encoding a TCR (e.g., an ap TCR) or other relevant receptor to avoid graft-versus-host-disease (GVHD). In some embodiments, where the engineered cells are T cells, the engineered cells are edited ex vivo by CRISPR or other appropriate gene modification method to mutate the TRAC locus. In some embodiments, T cells are edited ex vivo via a CRISPR-Cas system using one or more guide sequences targeting the first exon of TRAC. See Liu et al., Cell Research 27:154-157 (2017). In some embodiments, the first exon of TRAC is modified using another appropriate gene modification method. In some embodiments, the method comprises use of CRISPR or other appropriate method to knock-in an exogenous gene encoding a CAR or a TCR into the TRAC locus, while simultaneously knocking-out the endogenous TCR (e.g., with a donor sequence encoding a self-cleaving P2A peptide following the CAR cDNA). See Eyquem et al., Nature 543:113-117 (2017). In some embodiments, the exogenous gene comprises a promoter-less CAR-encoding or TCR-encoding sequence which is inserted operably downstream of an endogenous TCR promoter.

[0446] In some embodiments, the method comprises editing the engineered cell, e.g., engineered T cells, ex vivo via a CRISPR-Cas system to knock-out or knock-down an endogenous gene encoding an HLA-I protein to minimize immunogenicity of the edited cells, e.g. engineered T cells. In some embodiments, engineered T cells can be edited ex vivo via a CRISPR-Cas system to mutate the beta-2 microglobulin (B2M) locus. In some embodiments, engineered cell, e.g., engineered T cells, are edited ex vivo via a CRISPR-Cas system using one or more guide sequences targeting the first exon of B2M. The first exon of B2M can also be modified using another appropriate modification method. See Liu et al., Cell Research 27:154-157 (2017). The first exon of B2M can also be modified using another appropriate modification method, which will be appreciated by those of ordinary skill in the art. In some embodiments, the method comprises use a CRISPR-Cas system to knock-in an exogenous gene encoding a CAR or a TCR into the B2M locus, while simultaneously knocking-out the endogenous B2M (e.g., with a donor sequence encoding a self-cleaving P2A peptide following the CAR cDNA). See Eyquem et al., Nature 543.113-117 (2017). This can also be accomplished using another appropriate modification method, which will be appreciated by those of ordinary skill in the art. In some embodiments, the exogenous gene comprises a promoter-less CAR-encoding or TCR-encoding sequence which is inserted operably downstream of an endogenous B2M promoter.

[0447] In some embodiments, the method comprises editing the engineered cell, e.g., engineered T cells, ex vivo via a CRISPR-Cas system to knock-out or knock-down an endogenous gene encoding an antigen targeted by an exogenous CAR or TCR. This can also be accomplished using another appropriate modification method, which will be appreciated by those of ordinary skill in the art. In some embodiments, the engineered cells, such as engineered T cells, are edited ex vivo via a CRISPR-Cas system to knock-out or knock-down the expression of a tumor antigen selected from human telomerase reverse transcriptase (hTERT), survivin, mouse double minute 2 homolog (MDM2), cytochrome P450 1B 1 (CYP1B), HER2/neu, Wilms' tumor gene 1 (WT1), livin, alphafetoprotein (AFP), carcinoembryonic antigen (CEA), mucin 16 (MUC16), MUC1, prostate-specific membrane antigen (PSMA), p53 or cyclin (DI) (see e.g., International Patent Application Publication WO2016/011210). This can also be accomplished using another appropriate modification method, which will be appreciated by those of ordinary skill in the art. In some embodiments, the engineered cells, such as engineered T cells are edited ex vivo via a CRISPR-Cas system to knock-out or knock-down the expression of an antigen selected from B cell maturation antigen (BCMA), transmembrane activator and CAML Interactor (TACI), or B-cell activating factor receptor (BAFF-R), CD38, CD138, CS-1, CD33, CD26, CD30, CD53, CD92, CD100, CD148, CD150, CD200, CD261, CD262, or CD362 (see e.g., International Patent Application Publication WO2017/011804). This can also be accomplished using another appropriate modification method, which will be appreciated by those of ordinary skill in the art.

### Gene Drives

[0448] The present invention also contemplates use of the compositions containing a hematopoietic cell-specific targeting moiety described elsewhere herein, formulations thereof, cells thereof, vector systems, and the like to generate a gene drive via delivery of one or more cargo polynucleotides or production of a composition containing a hematopoietic cell-specific targeting moiety described elsewhere herein (including but not limited to engineered or variant AAV capsid particles) with one or more cargo polynucleotides capable of producing a gene drive. In some embodiments, the gene drive can be a Cas-mediated RNA-guided gene drive e.g., Cas- to provide RNA-guided gene drives, for example in systems analogous to gene drives described in International Patent Application Publication WO 2015/105928. Systems of this kind may for example provide methods for altering eukaryotic germline cells, by introducing into the germline cell a nucleic acid sequence encoding an RNA-guided DNA nuclease and one or more guide RNAs. The guide RNAs may be designed to be complementary to one or more target locations on genomic DNA of the germline cell. The nucleic acid sequence encoding the RNA guided DNA nuclease and the nucleic acid sequence encoding the guide RNAs may be provided on constructs between flanking sequences, with promoters arranged such that the germline cell may express the RNA guided DNA nuclease and the guide RNAs, together with any desired cargo-encoding sequences that are also situated between the flanking sequences. The flanking sequences will typically include a sequence which is identical to a corresponding sequence on a selected target chromosome, so that the flanking sequences work with the components encoded by the construct to facilitate insertion of the foreign nucleic acid construct sequences into genomic DNA at a target cut site by mechanisms such as homologous recombination, to render the germline cell homozygous for the foreign nucleic acid sequence. In this way, gene-drive systems are capable of introgressing desired cargo genes throughout a breeding population (see e.g., Gantz et al., 2015, Highly efficient Cas9-mediated gene drive for population modification of the malaria vector mosquito Anopheles stephensi, PNAS 2015, published ahead of print Nov. 23, 2015, doi:10.1073/pnas.1521077112; Esvelt et al., 2014, Concerning RNA-guided gene drives for the alteration of wild populations eLife 2014; 3:e03401). In select embodiments, target sequences may be selected which have few potential off-target sites in a genome. Targeting multiple sites within a target locus, using multiple guide RNAs, may increase the cutting frequency and hinder the evolution of drive resistant alleles. Truncated guide RNAs may reduce off-target cutting. Paired nickases may be used instead of a single nuclease, to further increase specificity. Gene drive constructs (such as gene drive engineered delivery system constructs) may include cargo sequences encoding transcriptional regulators, for example to activate homologous recombination genes and/or repress non-homologous end-joining. Target sites may be chosen within an essential gene, so that non-homologous end-joining events may cause lethality rather than creating a drive-resistant allele. The gene drive constructs can be engineered to function in a range of hosts at a range of temperatures (Cho et al. 2013, Rapid and Tunable Control of Protein Stability in Caenorhabditis elegans Using a Small Molecule, PLoS ONE 8(8): e72393. doi:10.1371/journal.pone.0072393).

### Transplantation and Xenotransplantation

[0449] The compositions containing a hematopoietic cell-specific targeting moiety described elsewhere herein, formulations thereof, cells thereof, vector systems, and the like, can be used to deliver cargo polynucleotides and/or otherwise be involved in modifying tissues for transplantation between two different persons (transplantation) or between species (xenotransplantation). Such techniques for generation of transgenic animals is described elsewhere herein. Interspecies transplantation techniques are generally known in the art. For example, RNA-guided DNA nucleases can be delivered using via engineered AAV capsid polynucleotides, vectors, engineered cells, and/or engineered AAV capsid particles described herein and can be used to knockout, knockdown or disrupt selected genes in an organ for transplant (e.g. ex vivo (e.g. after harvest but before transplantation) or in vivo (in donor or recipient)), animal, such as a transgenic pig (such as the human heme oxygenase-1 transgenic pig line), for example by disrupting expression of genes that encode epitopes recognized by the human immune system, i.e. xenoantigen genes. Candidate porcine genes for disruption may for example include c(1,3)-galactosyltransferase and cytidine monophosphate-N-acetylneuraminic acid hydroxylase genes (see PCT Patent Publication WO 2014/066505). In addition, genes encoding endogenous retroviruses may be disrupted, for example the genes encoding all porcine endogenous retroviruses (see Yang et al., 2015, Genome-wide inactivation of porcine endogenous retroviruses (PERVs), Science 27 Nov. 2015: Vol. 350 no. 6264 pp. 1101-1104). In addition, RNA-guided DNA nucleases may be used to target a site for integration of additional genes in xenotransplant donor animals, such as a human CD55 gene to improve protection against hyperacute rejection.

[0450] Where it is interspecies transplantation (such as human to human) the compositions containing a hematopoietic cell-specific targeting moiety described elsewhere herein, (e.g., an engineered AAV capsid system molecule, vectors, engineered cells, and/or engineered delivery particles described herein), can be used to deliver cargo polynucleotides and/or otherwise be involved to modify the tissue to be transplanted. In some embodiments, the modification can include modifying one or more HLA antigens or other tissue type determinants, such that the immunogenic profile is more similar or identical to the recipient's immunogenic profile than to the donor's so as to reduce the occurrence of rejection by the recipient. Relevant tissue type determinants are known in the art (such as those used to determine organ matching) and techniques to determine the immunogenic profile (which is made up of the expression signature of the tissue type determinants) are generally known in the art.

[0451] In some embodiments, the donor (such as before harvest) or recipient (after transplantation) can receive one or more of the compositions containing a hematopoietic cell-specific targeting moiety described elsewhere herein, formulations thereof, cells thereof, vector systems, engineered or variant AAV capsid system molecules, vectors, engineered cells, and/or engineered delivery particles described herein that are capable of modifying the immunogenic profile of the transplanted cells, tissue, and/or organ. In some embodiments, the transplanted cells, tissue, and/or organ can be harvested from the donor and the compositions containing a hematopoietic cell-specific targeting moiety described elsewhere herein, formulations thereof, cells thereof, vector systems, engineered AAV capsid system molecules, vectors, engineered cells, and/or engineered delivery particles described herein capable of modifying the harvested cells, tissue, and/or organ to be, for example, less immunogenic or be modified to have some specific characteristic when transplanted in the recipient can be delivered to the harvested cells, tissue, and/or organ ex vivo. After delivery the cells, tissue, and/or organs can be transplanted into the donor.

Gene Modification and Treatment of Diseases with Genetic or Epigenetic Aspects

[0452] The engineered delivery system molecules, vectors, engineered cells, and/or engineered delivery particles described herein containing a hematopoietic cell-specific targeting moiety can be used to modify genes or other polynucleotides and/or treat diseases with genetic and/or epigenetic aspects. As described elsewhere herein the cargo molecule can be a polynucleotide that can be delivered to a cell and, in some embodiments, be integrated into the genome of the cell. In some embodiments, the cargo molecule(s) can be one or more CRISPR-Cas system components. In some embodiments, the CRISPR-Cas components, when delivered by a composition or formulation thereof of the present invention, such as an engineered AAV capsid particles described herein, can be optionally expressed in the recipient cell and act to modify the genome of the recipient cell in a sequence specific manner. In some embodiments, the cargo molecules that can be packaged and delivered by the engineered AAV capsid particles or other particles and/or compositions described herein can facilitate/mediate genome modification via a method that is not dependent on CRISPR-Cas. Such non-CRISPR-Cas genome modification systems will instantly be appreciated by those of ordinary skill in the art and are also, at least in part, described elsewhere herein. In some embodiments, modification is at a specific target sequence. In other embodiments, modification is at locations that appear to be random throughout the genome.

[0453] Examples of disease-associated genes and polynucleotides and disease specific information is available from McKusick-Nathans Institute of Genetic Medicine, Johns Hopkins University (Baltimore, Md.) and National Center for Biotechnology Information, National Library of Medicine (Bethesda, Md.), available on the World Wide Web. Any of these can be appropriate to be treated by one or more of the methods described herein.

[0454] In some embodiments, the disease is a hematopoietic cell disease or disorder or blood disease or disorder (e.g., HIV/AIDs, blood cancers, bleeding disorders, hemoglobinopathies, primary immunodeficiencies, cytopenias, and/or storage and metabolic disorders. Further examples of genes, diseases and proteins are hereby incorporated by reference from U.S. Provisional application 61/736,527 filed Dec. 12, 2012. Such genes, proteins and pathways may be the target polynucleotide of a CRISPR complex or other method of gene modification of the present invention. Examples of disease-associated and/or cell function-associated genes and polynucleotides are listed in Tables 2 and 3. Additional examples are discussed elsewhere herein.

TABLE 2
Exemplary Genetic and Other Diseases and Associated Genes

| | Primary | | |
|---|---|---|---|
| | Tissues or | Additional | |
| | System | Tissues/Systems | |
| Disease Name | Affected | Affected | Genes |
| Achondroplasia | Bone and | | fibroblast growth factor |
| | Muscle | | receptor 3 (FGFR3) |
| Achromatopsia | eye | | CNGA3, CNGB3, GNAT2, |
| | | | PDE6C, PDE6H, ACHM2, |
| | | | ACHM3, |
| Acute Renal Injury | kidney | | NFkappaB, AATF, |
| | | | p85alpha, FAS, Apoptosis |
| | | | cascade elements (e.g. |
| | | | FASR, Caspase 2, 3, 4, 6, 7, |
| | | | 8, 9, 10, AKT, TNF alpha, |
| | | | IGF1, IGF1R, RIPK1), p53 |
| Age Related Macular | eye | | Abcr; CCL2; CC2; CP |
| Degeneration | | | (ceruloplasmin); Timp3; |
| | | | cathepsinD; VLDLR, CCR2 |
| AIDS | Immune System | | KIR3DL1, NKAT3, NKB1, |
| | | | AMB11, KIR3DS1, IFNG, |
| | | | CXCL12, SDF1 |
| Albinism (including | Skin, hair, eyes, | | TYR, OCA2, TYRP1, and |
| oculocutaneous albinism | | | SLC45A2, SLC24A5 and |
| (types 1-7) and ocular | | | C10orf11 |
| albinism) | | | |
| Alkaptonuria | Metabolism of | Tissues/organs | HGD |
| | amino acids | where | |
| | | homogentisic | |
| | | acid | |
| | | accumulates, | |
| | | particularly | |
| | | cartilage (joints), | |
| | | heart valves, | |
| | | kidneys | |
| alpha-1 antitrypsin | Lung | Liver, skin, | SERPINA1, those set forth |
| deficiency (AATD or | | vascular system, | in WO2017165862, PiZ |
| A1AD) | | kidneys, GI | allele |
| ALS | CNS | | SOD1; ALS2; ALS3; ALS5; |
| | | | ALS7; STEX; FUS; |
| | | | TARDBP; VEGF (VEGF-a; |
| | | | VEGF-b; VEGF-c); DPP6; |
| | | | NEFH, PTGS1, SLC1A2, |
| | | | TNFRSF10B, PRPH, |
| | | | HSP90AA1, CRIA2, IFNG, |
| | | | AMPA2 S100B, FGF2, |
| | | | AOX1, CS, TXN, RAPHJ1, |
| | | | MAP3K5, NBEAL1, GPX1, |
| | | | ICA1L, RAC1, MAPT, |
| | | | ITPR2, ALS2CR4, GLS, |
| | | | ALS2CR8, CNTFR, |
| | | | ALS2CR11, FOLH1, |
| | | | FAM117B, P4HB, CNTF, |
| | | | SQSTM1, STRADB, NAIP, |
| | | | NLR, YWHAQ, SLC33A1, |
| | | | TRAK2, SCA1, NIF3L1, |
| | | | NIF3, PARD3B, COX8A, |
| | | | CDK15, HECW1, HECT, |
| | | | C2, WW 15, NOS1, MET, |
| | | | SOD2, HSPB1, NEFL, |
| | | | CTSB, ANG, HSPA8, |
| | | | RNase A, VAPB, VAMP, |
| | | | SNCA, alpha HGF, CAT, |
| | | | ACTB, NEFM, TH, BCL2, |
| | | | FAS, CASP3, CLU, SMN1, |
| | | | G6PD, BAX, HSF1, |
| | | | RNF19A, JUN, ALS2CR12, |
| | | | HSPA5, MAPK14, APEX1, |
| | | | TXNRD1, NOS2, TIMP1, |
| | | | CASP9, XIAP, GLG1, EPO, |
| | | | VEGFA, ELN, GDNF, |
| | | | NFE2L2, SLC6A3, HSPA4, |
| | | | APOE, PSMB8, DCTN2, |
| | | | TIMP3, KIFAP3, SLC1A1, |
| | | | SMN2, CCNC, STUB1, |
| | | | ALS2, PRDX6, SYP, |
| | | | CABIN1, CASP1, GART, |
| | | | CDK5, ATXN3, RTN4, |
| | | | C1QB, VEGFC, HTT, |
| | | | PARK7, XDH, GFAP, |
| | | | MAP2, CYCS, FCGR3B, |
| | | | CCS, UBL5, MMP9m |
| | | | SLC18A3, TRPM7, HSPB2, |
| | | | AKT1, DEERL1, CCL2, |
| | | | NGRN, GSR, TPPP3, |
| | | | APAF1, BTBD10, GLUD1, |
| | | | CXCR4, S:C1A3, FLT1, |
| | | | PON1, AR, LIF, ERBB3, |
| | | | :GA:S1, CD44, TP53, |
| | | | TLR3, GRIA1, GAPDH, |
| | | | AMPA, GRIK1, DES, |
| | | | CHAT, FLT4, CHMP2B, |
| | | | BAG1, CHRNA4, GSS, |
| | | | BAK1, KDR, GSTP1, |
| | | | OGG1, IL6 |
| Alzheimer's Disease | Brain | | E1; CHIP; UCH; UBB; Tau; |
| | | | LRP; PICALM; CLU; PS1; |
| | | | SORL1; CR1; VLDLR; |
| | | | UBA1; UBA3; CHIP28; |
| | | | AQP1; UCHL1; UCHL3; |
| | | | APP, AAA, CVAP, AD1, |
| | | | APOE, AD2, DCP1, ACE1, |
| | | | MPO, PACIP1, PAXIP1L, |
| | | | PTIP, A2M, BLMH, BMH, |
| | | | PSEN1, AD3, ALAS2, |
| | | | ABCA1, BIN1, BDNF, |
| | | | BTNL8, C1ORF49, CDH4, |
| | | | CHRNB2, CKLFSF2, |
| | | | CLEC4E, CR1L, CSF3R, |
| | | | CST3, CYP2C, DAPK1, |
| | | | ESR1, FCAR, FCGR3B, |
| | | | FFA2, FGA, GAB2, GALP, |
| | | | GAPDHS, GMPB, HP, |
| | | | HTR7, IDE, IF127, IFI6, |
| | | | IFIT2, IL1RN, IL-1RA, |
| | | | IL8RA, IL8RB, JAG1, |
| | | | KCNJ15, LRP6, MAPT, |
| | | | MARK4, MPHOSPH1, |
| | | | MTHFR, NBN, NCSTN, |
| | | | NIACR2, NMNAT3, NTM, |
| | | | ORM1, P2RY13, PBEF1, |
| | | | PCK1, PICALM, PLAU, |
| | | | PLXNC1, PRNP, PSEN1, |
| | | | PSEN2, PTPRA, |
| | | | RALGPS2, RGSL2, |
| | | | SELENBP1, SLC25A37, |
| | | | SORL1, Mitoferrin-1, TF, |
| | | | TFAM, TNF, TNFRSF10C, |
| | | | UBE1C |
| Amyloidosis | | | APOA1, APP, AAA, |
| | | | CVAP, AD1, GSN, FGA, |
| | | | LYZ, TTR, PALB |
| Amyloid neuropathy | | | TTR, PALB |
| Anemia | Blood | | CDAN1, CDA1, RPS19, |
| | | | DBA, PKLR, PK1, NT5C3, |
| | | | UMPH1, PSN1, RHAG, |
| | | | RH50A, NRAMP2, SPTB, |
| | | | ALAS2, ANH1, ASB, |
| | | | ABCB7, ABC7, ASAT |
| Angelman Syndrome | Nervous system, | | UBE3A |
| | brain | | |
| Attention Deficit | Brain | | PTCHD1 |
| Hyperactivity Disorder | | | |
| (ADHD) | | | |
| Autoimmune | Immune system | | TNFRSF6, APT1, FAS, |
| lymphoproliferative | | | CD95, ALPS1A |
| syndrome | | | |
| Autism, Autism spectrum | Brain | | PTCHD1; Mecp2; BZRAP1; |
| disorders (ASDs), | | | MDGA2; Sema5A; |
| including Asperger's and | | | Neurexin 1; GLO1, RTT, |
| a general diagnostic | | | PPMX, MRX16, RX79, |
| category called Pervasive | | | NLGN3, NLGN4, |
| Developmental Disorders | | | KIAA1260, AUTSX2, |
| (PDDs) | | | FMR1, FMR2; FXR1; |
| | | | FXR2; MGLUR5, ATP10C, |
| | | | CDH10, GRM6, MGLUR6, |
| | | | CDH9, CNTN4, NLGN2, |
| | | | CNTNAP2, SEMA5A, |
| | | | DHCR7, NLGN4X, |
| | | | NLGN4Y, DPP6, NLGN5, |
| | | | EN2, NRCAM, MDGA2, |
| | | | NRXN1, FMR2, AFF2, |
| | | | FOXP2, OR4M2, OXTR, |
| | | | FXR1, FXR2, PAH, |
| | | | GABRA1, PTEN, |
| | | | GABRA5, PTPRZ1, |
| | | | GABRB3, GABRG1, |
| | | | HIRIP3, SEZ6L2, HOXA1, |
| | | | SHANK3, IL6, |
| | | | SHBZRAP1, LAMB1, |
| | | | SLC6A4, SERT, MAPK3, |
| | | | TAS2R1, MAZ, TSC1, |
| | | | MDGA2, TSC2, MECP2, |
| | | | UBE3A, WNT2, see also |
| | | | 20110023145 |
| autosomal dominant | kidney | liver | PKD1, PKD2 |
| polycystic kidney disease | | | |
| (ADPKD) - (includes | | | |
| diseases such as von | | | |
| Hippel-Lindau disease | | | |
| and tuberous sclerosis | | | |
| complex disease) | | | |
| Autosomal Recessive | kidney | liver | PKDH1 |
| Polycystic Kidney | | | |
| Disease (ARPKD) | | | |
| Ataxia-Telangiectasia | Nervous system, | various | ATM |
| (a.k.a Louis Bar | immune system | | |
| syndrome) | | | |
| B-Cell Non-Hodgkin | | | BCL7A, BCL7 |
| Lymphoma | | | |
| Bardet-Biedl syndrome | Eye, | Liver, ear, | ARL6, BBS1, BBS2, BBS4, |
| | musculoskeletal | gastrointestinal | BBS5, BBS7, BBS9, |
| | system, kidney, | system, brain | BBS10, BBS12, CEP290, |
| | reproductive | | INPP5E, LZTFL1, MKKS, |
| | organs | | MKS1, SDCCAG8, |
| | | | TRIM32, TTC8 |
| Bare Lymphocyte | blood | | TAPBP, TPSN, TAP2, |
| Syndrome | | | ABCB3, PSF2, RING11, |
| | | | MHC2TA, C2TA, RFX5, |
| | | | RFXAP, RFX5 |
| Bartter's Syndrome (types | kidney | | SLC12A1 (type I), KCNJ1 |
| I, II, III, IVA and B, and | | | (type II), CLCNKB (type |
| V) | | | III), BSND (type IV A), or |
| | | | both the CLCNKA |
| | | | CLCNKB genes (type IV |
| | | | B), CASR (type V). |
| Becker muscular | Muscle | | DMD, BMD, MYF6 |
| dystrophy | | | |
| Best Disease (Vitelliform | eye | | VMD2 |
| Macular Dystrophy type | | | |
| 2 ) | | | |
| Bleeding Disorders | blood | | TBXA2R, P2RX1, P2X1 |
| Blue Cone | eye | | OPN1LW, OPN1MW, and |
| Monochromacy | | | LCR |
| Breast Cancer | Breast tissue | | BRCA1, BRCA2, COX-2 |
| Bruton's Disease (aka X- | Immune system, | | BTK |
| linked | specifically B | | |
| Agammglobulinemia) | cells | | |
| Cancers (e.g., lymphoma, | Various | | FAS, BID, CTLA4, PDCD1, |
| chronic lymphocytic | | | CBLB, PTPN6, TRAC, |
| leukemia (CLL), B cell | | | TRBC, those described in |
| acute lymphocytic | | | WO2015048577 |
| leukemia (B-ALL), acute | | | |
| lymphoblastic leukemia, | | | |
| acute myeloid leukemia, | | | |
| non-Hodgkin's lymphoma | | | |
| (NHL), diffuse large cell | | | |
| lymphoma (DLCL), | | | |
| multiple myeloma, renal | | | |
| cell carcinoma (RCC), | | | |
| neuroblastoma, colorectal | | | |
| cancer, breast cancer, | | | |
| ovarian cancer, | | | |
| melanoma, sarcoma, | | | |
| prostate cancer, lung | | | |
| cancer, esophageal | | | |
| cancer, hepatocellular | | | |
| carcinoma, pancreatic | | | |
| cancer, astrocytoma, | | | |
| mesothelioma, head and | | | |
| neck cancer, and | | | |
| medulloblastoma | | | |
| Cardiovascular Diseases | heart | Vascular system | IL1B, XDH, TP53, PTGS, |
| | | | MB, IL4, ANGPT1, |
| | | | ABCGu8, CTSK, PTGIR, |
| | | | KCNJ11, INS, CRP, |
| | | | PDGFRB, CCNA2, |
| | | | PDGFB, KCNJ5, KCNN3, |
| | | | CAPN10, ADRA2B, |
| | | | ABCG5, PRDX2, CPAN5, |
| | | | PARP14, MEX3C, ACE, |
| | | | RNF, IL6, TNF, STN, |
| | | | SERPINE1, ALB, ADIPOQ, |
| | | | APOB, APOE, LEP, |
| | | | MTHFR, APOA1, EDN1, |
| | | | NPPB, NOS3, PPARG, |
| | | | PLAT, PTGS2, CETP, |
| | | | AGTR1, HMGCR, IGF1, |
| | | | SELE, REN, PPARA, |
| | | | PON1, KNG1, CCL2, LPL, |
| | | | VWF, F2, ICAM1, TGFB, |
| | | | NPPA, IL10, EPO, SOD1, |
| | | | VCAM1, IFNG, LPA, |
| | | | MPO, ESR1, MAPK, HP, |
| | | | F3, CST3, COG2, MMP9, |
| | | | SERPINC1, F8, HMOX1, |
| | | | APOC3, IL8, PROL1, CBS, |
| | | | NOS2, TLR4, SELP, |
| | | | ABCA1, AGT, LDLR, GPT, |
| | | | VEGFA, NR3C2, IL18, |
| | | | NOS1, NR3C1, FGB, HGF, |
| | | | IL1A, AKT1, LIPC, |
| | | | HSPD1, MAPK14, SPP1, |
| | | | ITGB3, CAT, UTS2, |
| | | | THBD, F10, CP, |
| | | | TNFRSF11B, EGFR, |
| | | | MMP2, PLG, NPY, RHOD, |
| | | | MAPK8, MYC, FN1, |
| | | | CMA1, PLAU, GNB3, |
| | | | ADRB2, SOD2, F5, VDR, |
| | | | ALOX5, HLA-DRB1, |
| | | | PARP1, CD40LG, PON2, |
| | | | AGER, IRS1, PTGS1, |
| | | | ECE1, F7, IRMN, EPHX2, |
| | | | IGFBP1, MAPK10, FAS, |
| | | | ABCB1, JUN, IGFBP3, |
| | | | CD14, PDE5A, AGTR2, |
| | | | CD40, LCAT, CCR5, |
| | | | MMP1, TIMP1, ADM, |
| | | | DYT10, STAT3, MMP3, |
| | | | ELN, USF1, CFH, HSPA4, |
| | | | MMP12, MME, F2R, SELL, |
| | | | CTSB, ANXA5, ADRB1, |
| | | | CYBA, FGA, GGT1, LIPG, |
| | | | HIF1A, CXCR4, PROC, |
| | | | SCARB1, CD79A, PLTP, |
| | | | ADD1, FGG, SAA1, |
| | | | KCNH2, DPP4, NPR1, |
| | | | VTN, KIAA0101, FOS, |
| | | | TLR2, PPIG, IL1R1, AR, |
| | | | CYP1A1, SERPINA1, |
| | | | MTR, RBP4, APOA4, |
| | | | CDKN2A, FGF2, EDNRB, |
| | | | ITGA2, VLA-2, CABIN1, |
| | | | SHBG, HMGB1, |
| | | | HSP90B2P, CYP3A4, |
| | | | GJA1, CAV1, ESR2, LTA, |
| | | | GDF15, BDNF, CYP2D6, |
| | | | NGF, SP1, TGIF1, SRC, |
| | | | EGF, PIK3CG, HLA-A, |
| | | | KCNQ1, CNR1, FBN1, |
| | | | CHKA, BEST1, CTNNB1, |
| | | | IL2, CD36, PRKAB1, TPO, |
| | | | ALDH7A1, CX3CR1, TH, |
| | | | F9, CH1, TF, HFE, IL17A, |
| | | | PTEN, GSTM1, DMD, |
| | | | GATA4, F13A1, TTR, |
| | | | FABP4, PON3, APOC1, |
| | | | INSR, TNFRSF1B, HTR2A, |
| | | | CSF3, CYP2C9, TXN, |
| | | | CYP11B2, PTH, CSF2, |
| | | | KDR, PLA2G2A, THBS1, |
| | | | GCG, RHOA, ALDH2, |
| | | | TCF7L2, NFE2L2, |
| | | | NOTCH1, UGT1A1, |
| | | | IFNA1, PPARD, SIRT1, |
| | | | GNHR1, PAPPA, ARR3, |
| | | | NPPC, AHSP, PTK2, IL13, |
| | | | MTOR, ITGB2, GSTT1, |
| | | | IL6ST, CPB2, CYP1A2, |
| | | | HNF4A, SLC64A, |
| | | | PLA2G6, TNFSF11, |
| | | | SLC8A1, F2RL1, AKR1A1, |
| | | | ALDH9A1, BGLAP, |
| | | | MTTP, MTRR, SULT1A3, |
| | | | RAGE, C4B, P2RY12, |
| | | | RNLS, CREB1, POMC, |
| | | | RAC1, LMNA, CD59, |
| | | | SCM5A, CYP1B1, MIF, |
| | | | MMP13, TIMP2, |
| | | | CYP19A1, CUP21A2, |
| | | | PTPN22, MYH14, MBL2, |
| | | | SELPLG, AOC3, CTSL1, |
| | | | PCNA, IGF2, ITGB1, |
| | | | CAST, CXCL12, IGHE, |
| | | | KCNE1, TFRC, COL1A1, |
| | | | COL1A2, IL2RB, |
| | | | PLA2G10, ANGPT2, |
| | | | PROCR, NOX4, HAMP, |
| | | | PTPN11, SLCA1, IL2RA, |
| | | | CCL5, IRF1, CF:AR, |
| | | | CA:CA, EIF4E, GSTP1, |
| | | | JAK2, CYP3A5, HSPG2, |
| | | | CCL3, MYD88, VIP, |
| | | | SOAT1, ADRBK1, NR4A2, |
| | | | MMP8, NPR2, GCH1, |
| | | | EPRS, PPARGC1A, F12, |
| | | | PECAM1, CCL4, |
| | | | CERPINA34, CASR, |
| | | | FABP2, TTF2, PROS1, |
| | | | CTF1, SGCB, YME1LI, |
| | | | CAMP, ZC3H12A, |
| | | | AKR1B1, MMP7, AHR, |
| | | | CSF1, HDAC9, CTGF, |
| | | | KCNMA1, UGT1A, |
| | | | PRKCA, COMT, S100B, |
| | | | EGR1, PRL, IL15, DRD4, |
| | | | CAMK2G, SLC22A2, |
| | | | CCL11, PGF, THPO, GP6, |
| | | | TACR1, NTS, HNF1A, |
| | | | SST, KCDN1, LOC646627, |
| | | | TBXAS1, CUP2J2, |
| | | | TBXA2R, ADH1C, |
| | | | ALOX12, AHSG, BHMT, |
| | | | GJA4, SLC25A4, ACLY, |
| | | | ALOX5AP, NUMA1, |
| | | | CYP27B1, CYSLTR2, |
| | | | SOD3, LTC4S, UCN, |
| | | | GHRL, APOC2, CLEC4A, |
| | | | KBTBD10, TNC, TYMS, |
| | | | SHC1, LRP1, SOCS3, |
| | | | ADH1B, KLK3, HSD11B1, |
| | | | VKORC1, SERPINB2, |
| | | | TNS1, RNF19A, EPOR, |
| | | | ITGAM, PITX2, MAPK7, |
| | | | FCGR3A, LEEPR, ENG, |
| | | | GPX1, GOT2, HRH1, |
| | | | NR112, CRH, HTR1A, |
| | | | VDAC1, HPSE, SFTPD, |
| | | | TAP2, RMF123, PTK2Bm |
| | | | NTRK2, IL6R, ACHE, |
| | | | GLP1R, GHR, GSR, NQO1, |
| | | | NR5A1, GJB2, SLC9A1, |
| | | | MAOA, PCSK9, FCGR2A, |
| | | | SERPINF1, EDN3, UCP2, |
| | | | TFAP2A, C4BPA, |
| | | | SERPINF2, TYMP, ALPP, |
| | | | CXCR2, SLC3A3, ABCG2, |
| | | | ADA, JAK3, HSPA1A, |
| | | | FASN, FGF1, F11, ATP7A, |
| | | | CR1, GFPA, ROCK1, |
| | | | MECP2, MYLK, BCHE, |
| | | | LIPE, ADORA1, WRN, |
| | | | CXCR3, CD81, SMAD7, |
| | | | LAMC2, MAP3K5, CHGA, |
| | | | IAPP, RHO, ENPP1, |
| | | | PTHLH, NRG1, VEGFC, |
| | | | ENPEP, CEBPB, NAGLU,. |
| | | | F2RL3, CX3CL1, |
| | | | BDKRB1, ADAMTS13, |
| | | | ELANE, ENPP2, CISH, |
| | | | GAST, MYOC, ATP1A2, |
| | | | NF1, GJB1, MEF2A, VCL, |
| | | | BMPR2, TUBB, CDC42, |
| | | | KRT18, HSF1, MYB, |
| | | | PRKAA2, ROCK2, TFP1, |
| | | | PRKG1, BMP2, CTNND1, |
| | | | CTH, CTSS, VAV2, |
| | | | NPY2R, IGFBP2, CD28, |
| | | | GSTA1, PPIA, APOH, |
| | | | S100A8, IL11, ALOX15, |
| | | | FBLN1, NR1H3, SCD, GIP, |
| | | | CHGB, PRKCB, |
| | | | SRD5A1, HSD11B2, |
| | | | CALCRL, GALNT2, |
| | | | ANGPTL4, KCNN4, |
| | | | PIK3C2A, HBEGF, |
| | | | CYP7A1, HLA-DRB5, |
| | | | BNIP3, GCKR, S100A12, |
| | | | PADI4, HSPA14, CXCR1, |
| | | | H19, KRTAP19-3, IDDM2, |
| | | | RAC2, YRY1, CLOCK, |
| | | | NGFR, DBH, CHRNA4, |
| | | | CACNA1C, PRKAG2, |
| | | | CHAT, PTGDS, NR1H2, |
| | | | TEK, VEGFB, MEF2C, |
| | | | MAPKAPK2, TNFRSF11A, |
| | | | HSPA9, CYSLTR1, |
| | | | MAT1A, OPRL1, IMPA1, |
| | | | CLCN2, DLD, PSMA6, |
| | | | PSMB8, CHI3L1, |
| | | | ALDH1B1, PARP2, STAR, |
| | | | LBP, ABCC6, RGS2, |
| | | | EFNB2, GJB6, APOA2, |
| | | | AMPD1, DYSF, |
| | | | FDFT1, EMD2, CCR6, |
| | | | GJB3, IL1RL1, ENTPD1, |
| | | | BBS4, CELSR2, F11R, |
| | | | RAPGEF3, HYAL1, |
| | | | ZNF259, ATOX1, ATF6, |
| | | | KHK, SAT1, GGH, TIMP4, |
| | | | SLC4A4, PDE2A, PDE3B, |
| | | | FADS1, FADS2, TMSB4X, |
| | | | TXNIP, LIMS1, RHOB, |
| | | | LY96, FOXO1, |
| | | | PNPLA2, TRH, GJC1, |
| | | | S:C17A5, FTO, GJD2, |
| | | | PRSC1, CASP12, GPBAR1, |
| | | | PXK, IL33, TRIB1, PBX4, |
| | | | NUPR1, 15-SEP, CILP2, |
| | | | TERC, GGT2, MTCO1, |
| | | | UOX, AVP, ANGPLT3 |
| Cataract | eye | | CRYAA, CRYA1, |
| | | | CRYBB2, CRYB2, PITX3, |
| | | | BFSP2, CP49, CP47, |
| | | | CRYAA, CRYA1, PAX6, |
| | | | AN2, MGDA, CRYBA1, |
| | | | CRYB1, CRYGC, CRYG3, |
| | | | CCL, LIM2, MP19, |
| | | | CRYGD, CRYG4, BFSP2, |
| | | | CP49, CP47, HSF4, CTM, |
| | | | HSF4, CTM, MIP, AQP0, |
| | | | CRYAB, CRYA2, CTPP2, |
| | | | CRYBB1, CRYGD, |
| | | | CRYG4, CRYBB2, |
| | | | CRYB2, CRYGC, CRYG3, |
| | | | CCL, CRYAA, CRYA1, |
| | | | GJA8, CX50, CAE1, GJA3, |
| | | | CX46, CZP3, CAE3, |
| | | | CCM1, CAM, KRIT1 |
| CDKL-5 Deficiencies or | Brain, CNS | | CDKL5 |
| Mediated Diseases | | | |
| Charcot-Marie-Tooth | Nervous system | Muscles | PMP22 (CMT1A and E), |
| (CMT) disease (Types 1, | | (dystrophy) | MPZ (CMT1B), LITAF |
| 2, 3, 4,) | | | (CMT1C), EGR2 (CMT1D), |
| | | | NEFL (CMT1F), GJB1 |
| | | | (CMT1X), MFN2 |
| | | | (CMT2A), KIF1B |
| | | | (CMT2A2B), RAB7A |
| | | | (CMT2B), TRPV4 |
| | | | (CMT2C), GARS |
| | | | (CMT2D), NEFL (CMT2E), |
| | | | GAPD1 (CMT2K), HSPB8 |
| | | | (CMT2L), DYNC1H1, |
| | | | CMT2O), LRSAM1 |
| | | | (CMT2P), IGHMBP2 |
| | | | (CMT2S), MORC2 |
| | | | (CMT2Z), GDAP1 |
| | | | (CMT4A), MTMR2 or |
| | | | SBF2/MTMR13 (CMT4B), |
| | | | SH3TC2 (CMT4C), |
| | | | NDRG1 (CMT4D), PRX |
| | | | (CMT4F), FIG. 4 (CMT4J), |
| | | | NT-3 |
| Chediak-Higashi | Immune system | Skin, hair, eyes, | LYST |
| Syndrome | | neurons | |
| Choroideremia | | | CHM, REP1, |
| Chorioretinal atrophy | eye | | PRDM13, RGR, TEAD1 |
| Chronic Granulomatous | Immune system | | CYBA, CYBB, NCF1, |
| Disease | | | NCF2, NCF4 |
| Chronic Mucocutaneous | Immune system | | AIRE, CARD9, CLEC7A |
| Candidiasis | | | IL12B, IL12B1, IL1F, |
| | | | IL17RA, IL17RC, RORC, |
| | | | STAT1, STAT3, TRAF31P2 |
| Cirrhosis | liver | | KRT18, KRT8, CIRH1A, |
| | | | NAIC, TEX292, KIAA1988 |
| Colon cancer (Familial | Gastrointestinal | | FAP: APC |
| adenomatous polyposis | | | HNPCC: MSH2, MLH1, |
| (FAP) and hereditary | | | PMS2, SH6, PMS1 |
| nonpolyposis colon | | | |
| cancer (HNPCC)) | | | |
| Combined | Immune System | | IL2RG, SCIDX1, SCIDX, |
| Immunodeficiency | | | IMD4); HIV-1 (CCL5, |
| | | | SCYA5, D17S136E, |
| | | | TCP228 |
| Cone(-rod) dystrophy | eye | | AIPL1, CRX, GUA1A, |
| | | | GUCY2D, PITPM3, |
| | | | PROM1, PRPH2, RIMS1, |
| | | | SEMA4A, ABCA4, |
| | | | ADAM9, ATF6, C21ORF2, |
| | | | C8ORF37, CACNA2D4, |
| | | | CDHR1, CERKL, CNGA3, |
| | | | CNGB3, CNNM4, CNAT2, |
| | | | IFT81, KCNV2, PDE6C, |
| | | | PDE6H, POC1B, RAX2, |
| | | | RDH5, RPGRIP1, TTLL5, |
| | | | RetCG1, GUCY2E |
| Congenital Stationary | eye | | CABP4, CACNA1F, |
| Night Blindness | | | CACNA2D4, GNAT1, |
| | | | CPR179, GRK1, GRM6, |
| | | | LRIT3, NYX, PDE6B, |
| | | | RDH5, RHO, RLBP1, |
| | | | RPE65, SAG, SLC24A1, |
| | | | TRPM1, |
| Congenital Fructose | Metabolism | | ALDOB |
| Intolerance | | | |
| Cori's Disease (Glycogen | Various- | | AGL |
| Storage Disease Type III) | wherever | | |
| | glycogen | | |
| | accumulates, | | |
| | particularly | | |
| | liver, heart, | | |
| | skeletal muscle | | |
| Corneal clouding and | eye | | APOA1, TGFBI, CSD2, |
| dystrophy | | | CDGG1, CSD, BIGH3, |
| | | | CDG2, TACSTD2, TROP2, |
| | | | M1S1, VSX1, RINX, |
| | | | PPCD, PPD, KTCN, |
| | | | COL8A2, FECD, PPCD2, |
| | | | PIP5K3, CFD |
| Cornea plana congenital | | | KERA, CNA2 |
| Cri du chat Syndrome, | | | Deletions involving only |
| also known as 5p | | | band 5p15.2 to the entire |
| syndrome and cat cry | | | short arm of chromosome 5, |
| syndrome | | | e.g. CTNND2, TERT, |
| Cystic Fibrosis (CF) | Lungs and | Pancreas, liver, | CTFR, ABCC7, CF, MRP7, |
| | respiratory | digestive | SCNN1A, those described in |
| | system | system, | WO2015157070 |
| | | reproductive | |
| | | system, | |
| | | exocrine, glands, | |
| Diabetic nephropathy | kidney | | Gremlin, 12/15- |
| | | | lipoxygenase, TIM44, |
| Dent Disease (Types 1 | Kidney | | Type 1: CLCN5, Type 2: |
| and 2) | | | ORCL |
| Dentatorubral- | CNS, brain, | | Atrophin-1 and Atn1 |
| Pallidoluysian Atrophy | muscle | | |
| (DRPLA) (aka Haw River | | | |
| and Naito-Oyanagi | | | |
| Disease) | | | |
| Down Syndrome | various | | Chromosome 21 trisomy |
| Drug Addiction | Brain | | Prkce; Drd2; Drd4; ABAT; |
| | | | GRIA2; Grm5; Grin1; Htr1b; |
| | | | Grin2a; Drd3; Pdyn; Gria1 |
| Duane syndrome (Types | eye | | CHN1, indels on |
| 1, 2, and 3, including | | | chromosomes 4 and 8 |
| subgroups A, B and C). | | | |
| Other names for this | | | |
| condition include Duane's | | | |
| Retraction Syndrome (or | | | |
| DR syndrome), Eye | | | |
| Retraction Syndrome, | | | |
| Retraction Syndrome, | | | |
| Congenital retraction | | | |
| syndrome and Stilling- | | | |
| Turk-Duane Syndrome | | | |
| Duchenne muscular | muscle | Cardiovascular, | DMD, BMD, dystrophin |
| dystrophy (DMD) | | respiratory | gene, intron flanking exon |
| | | | 51 of DMD gene, exon 51 |
| | | | mutations in DMD gene, see |
| | | | also WO2013163628 and |
| | | | U.S. Pat. Pub. 20130145487 |
| Edward's Syndrome | | | Complete or partial trisomy |
| (Trisomy 18) | | | of chromosome 18 |
| Ehlers-Danlos Syndrome | Various | | COL5A1, COL5A2, |
| (Types I-VI) | depending on | | COL1A1, COL3A1, TNXB, |
| | type: including | | PLOD1, COL1A2, FKBP14 |
| | musculoskeletal, | | and ADAMTS2 |
| | eye, vasculature, | | |
| | immune, and | | |
| | skin | | |
| Emery-Dreifuss muscular | muscle | | LMNA, LMN1, EMD2, |
| dystrophy | | | FPLD, CMD1A, HGPS, |
| | | | LGMD1B, LMNA, LMN1, |
| | | | EMD2, FPLD, CMD1A |
| Enhanced S-Cone | eye | | NR2E3, NRL |
| Syndrome | | | |
| Fabry's Disease | Various - | | GLA |
| | including skin, | | |
| | eyes, and | | |
| | gastrointestinal | | |
| | system, kidney, | | |
| | heart, brain, | | |
| | nervous system | | |
| Facioscapulohumeral | muscles | | FSHMD1A, FSHD1A, |
| muscular dystrophy | | | FRG1, |
| Factor H and Factor H- | blood | | HF1, CFH, HUS |
| like 1 | | | |
| Factor V Leiden | blood | | Factor V (F5) |
| thrombophilia and Factor | | | |
| V deficiency | | | |
| Factor V and Factor VII | blood | | MCFD2 |
| deficiency | | | |
| Factor VII deficiency | blood | | F7 |
| Factor X deficiency | blood | | F10 |
| Factor XI deficiency | blood | | F11 |
| Factor XII deficiency | blood | | F12, HAF |
| Factor XIIIA deficiency | blood | | F13A1, F13A |
| Factor XIIIB deficiency | blood | | F13B |
| Familial | Cardiovascular | | APOB, LDLR, PCSK9 |
| Hypercholesterolemia | system | | |
| Familial Mediterranean | Various- | Heart, kidney, | MEFV |
| Fever (FMF) also called | organs/tissues | brain/CNS, | |
| recurrent polyserositis or | with serous or | reproductive | |
| familial paroxysmal | synovial | organs | |
| polyserositis | membranes, | | |
| | skin, joints | | |
| Fanconi Anemia | Various - blood | | FANCA, FACA, FA1, FA, |
| | (anemia), | | FAA, FAAP95, FAAP90, |
| | immune system, | | FLJ34064, FANCC, |
| | cognitive, | | FANCG, RAD51, BRCA1, |
| | kidneys, eyes, | | BRCA2, BRIP1, BACH1, |
| | musculoskeletal | | FANCJ, FANCB, FANCD1, |
| | | | FANCD2, FANCD, FAD, |
| | | | FANCE, FACE, FANCF, |
| | | | FANCI, ERCC4, FANCL, |
| | | | FANCM, PALB2, |
| | | | RAD51C, SLX4, UBE2T, |
| | | | FANCB, XRCC9, PHF9, |
| | | | KIAA1596 |
| Fanconi Syndrome Types | kidneys | | FRTS1, GATM |
| I (Childhood onset) and II | | | |
| (Adult Onset) | | | |
| Fragile X syndrome and | brain | | FMR1, FMR2; FXR1; |
| related disorders | | | FXR2; mGLUR5 |
| Fragile XE Mental | Brain, nervous | | FMR1 |
| Retardation (aka Martin | system | | |
| Bell syndrome) | | | |
| Friedreich Ataxia | Brain, nervous | heart | FXN/X25 |
| (FRDA) | system | | |
| Fuchs endothelial corneal | Eye | | TCF4; COL8A2 |
| dystrophy | | | |
| Galactosemia | Carbohydrate | Various-where | GALT, GALK1, and GALE |
| | metabolism | galactose | |
| | disorder | accumulates - | |
| | | liver, brain, eyes | |
| Gastrointestinal Epithelial | | | CISH |
| Cancer, GI cancer | | | |
| Gaucher Disease (Types | Fat metabolism | Various-liver, | GBA |
| 1, 2, and 3, as well as | disorder | spleen, blood, | |
| other unusual forms that | | CNS, skeletal | |
| may not fit into these | | system | |
| types) | | | |
| Griscelli syndrome | | | |
| Glaucoma | eye | | MYOC, TIGR, GLC1A, |
| | | | JOAG, GPOA, OPTN, |
| | | | GLC1E, FIP2, HYPL, NRP, |
| | | | CYP1B1, GLC3A, OPA1, |
| | | | NTG, NPG, CYP1B1, |
| | | | GLC3A, those described in |
| | | | WO2015153780 |
| Glomerulosclerosis | kidney | | CC chemokine ligand 2 |
| Glycogen Storage | Metabolism | | SLC2A2, GLUT2, G6PC, |
| Diseases Types I-VI -See | Diseases | | G6PT, G6PT1, GAA, |
| also Cori's Disease, | | | LAMP2, LAMPB, AGL, |
| Pompe Disease, | | | GDE, GBE1, GYS2, PYGL, |
| McArdle's disease, Hers | | | PFKM, see also Cori's |
| Disease, and Von | | | Disease, Pompe's Disease, |
| Gierke's disease | | | McArdle's disease, Hers |
| | | | Disease, and Von Gierke's |
| | | | disease |
| RBC Glycolytic enzyme | blood | | any mutations in a gene for |
| deficiency | | | an enzyme in the glycolysis |
| | | | pathway including mutations |
| | | | in genes for hexokinases I |
| | | | and II, glucokinase, |
| | | | phosphoglucose isomerase, |
| | | | phosphofructokinase, |
| | | | aldolase Bm triosephosphate |
| | | | isomerease, |
| | | | glyceraldehydee-3- |
| | | | phosphate dehydrogenase, |
| | | | phosphoglycerokinase, |
| | | | phosphoglycerate mutase, |
| | | | enolase I, pyruvate kinase |
| Hartnup disease | Malabsorption | Various- brain, | SLC6A19 |
| | disease | gastrointestinal, | |
| | | skin, | |
| Hearing Loss | ear | | NOX3, Hes5, BDNF, |
| Hemochromatosis (HH) | Iron absorption | Various- | HFE and H63D |
| | regulation | wherever iron | |
| | disease | accumulates, | |
| | | liver, heart, | |
| | | pancreas, joints, | |
| | | pituitary gland | |
| Hemophagocytic | blood | | PRF1, HPLH2, UNC13D, |
| lymphohistiocytosis | | | MUNC13-4, HPLH3, |
| disorders | | | HLH3, FHL3 |
| Hemorrhagic disorders | blood | | PI, ATT, F5 |
| Hers disease (Glycogen | liver | muscle | PYGL |
| storage disease Type VI) | | | |
| Hereditary angioedema | | | kalikrein B1 |
| (HAE) | | | |
| Hereditary Hemorrhagic | Skin and | | ACVRL1, ENG and |
| Telangiectasia (Osler- | mucous | | SMAD4 |
| Weber-Rendu Syndrome) | membranes | | |
| Hereditary Spherocytosis | blood | | NK1, EPB42, SLC4A1, |
| | | | SPTA1, and SPTB |
| Hereditary Persistence of | blood | | HBG1, HBG2, BCL11A, |
| Fetal Hemoglobin | | | promoter region of HBG 1 |
| | | | and/or 2 (in the CCAAT |
| | | | box) |
| Hemophilia (hemophilia | blood | | A: FVIII, F8C, HEMA |
| A (Classic) a B (aka | | | B: FVIX, HEMB, FIX |
| Christmas disease) and C) | | | C: F9, F11 |
| Hepatic adenoma | liver | | TCF1, HNF1A, MODY3 |
| Hepatic failure, early | liver | | SCOD1, SCO1 |
| onset, and neurologic | | | |
| disorder | | | |
| Hepatic lipase deficiency | liver | | LIPC |
| Hepatoblastoma, cancer | liver | | CTNNB1, PDGFRL, |
| and carcinomas | | | PDGRL, PRLTS, AXIN1, |
| | | | AXIN, CTNNB1, TP53, |
| | | | P53, LFS1, IGF2R, MPRI, |
| | | | MET, CASP8, MCH5 |
| Hermansky-Pudlak | Skin, eyes, | | HPS1, HPS3, HPS4, HPS5, |
| syndrome | blood, lung, | | HPS6, HPS7, DTNBP1, |
| | kidneys, | | BLOC1, BLOC1S2, BLOC3 |
| | intestine | | |
| HIV susceptibility or | Immune system | | IL10, CSIF, CMKBR2, |
| infection | | | CCR2, CMKBR5, CCCKR5 |
| | | | (CCR5), those in |
| | | | WO2015148670A1 |
| Holoprosencephaly (HPE) | brain | | ACVRL1, ENG, SMAD4 |
| (Alobar, Semilobar, and | | | |
| Lobar) | | | |
| Homocystinuria | Metabolic | Various- | CBS, MTHFR, MTR, |
| | disease | connective | MTRR, and MMADHC |
| | | tissue, muscles, | |
| | | CNS, | |
| | | cardiovascular | |
| | | system | |
| HPV | | | HPV16 and HPV18 E6/E7 |
| HSV1, HSV2, and | eye | | HSV1 genes (immediate |
| related keratitis | | | early and late HSV-1 genes |
| | | | (UL1, 1.5, 5, 6, 8, 9, 12, 15, |
| | | | 16, 18, 19, 22, 23, 26, 26.5, |
| | | | 27, 28, 29, 30, 31, 32, 33, |
| | | | 34, 35, 36, 37, 38, 42, 48, |
| | | | 49.5, 50, 52, 54, S6, RL2, |
| | | | RS1, those described in |
| | | | WO2015153789, |
| | | | WO2015153791 |
| Hunter's Syndrome (aka | Lysosomal | Various- liver, | IDS |
| Mucopolysaccharidosis | storage disease | spleen, eye, | |
| type II) | | joint, heart, | |
| | | brain, skeletal | |
| Huntington's disease | Brain, nervous | | HD, HTT, IT15, PRNP, |
| (HD) and HD-like | system | | PRIP, JPH3, JP3, HDL2, |
| disorders | | | TBP, SCA17, PRKCE; |
| | | | IGF1; EP300; RCOR1; |
| | | | PRKCZ; HDAC4; and |
| | | | TGM2, and those described |
| | | | in WO2013130824, |
| | | | WO2015089354 |
| Hurler's Syndrome (aka | Lysosomal | Various- liver, | IDUA, α-L-iduronidase |
| mucopolysaccharidosis | storage disease | spleen, eye, | |
| type I H, MPS IH) | | joint, heart, | |
| | | brain, skeletal | |
| Hurler-Scheie syndrome | Lysosomal | Various- liver, | IDUA, α-L-iduronidase |
| (aka | storage disease | spleen, eye, | |
| mucopolysaccharidosis | | joint, heart, | |
| type I H-S, MPS I H-S) | | brain, skeletal | |
| hyaluronidase deficiency | Soft and | | HYAL1 |
| (aka MPS IX) | connective | | |
| | tissues | | |
| Hyper IgM syndrome | Immune system | | CD40L |
| Hyper- tension caused | kidney | | Mineral corticoid receptor |
| renal damage | | | |
| Immunodeficiencies | Immune System | | CD3E, CD3G, AICDA, |
| | | | AID, HIGM2, TNFRSF5, |
| | | | CD40, UNG, DGU, |
| | | | HIGM4, TNFSF5, |
| | | | CD40LG, HIGM1, IGM, |
| | | | FOXP3, IPEX, AIID, XPID, |
| | | | PIDX, TNFRSF14B, TACI |
| Inborn errors of | Metabolism | Various organs | See also: Carbohydrate |
| metabolism: including | diseases, liver | and cells | metabolism disorders (e.g., |
| urea cycle disorders, | | | galactosemia), Amino acid |
| organic acidemias), fatty | | | Metabolism disorders (e.g., |
| acid oxidation defects, | | | phenylketonuria), Fatty acid |
| amino acidopathies, | | | metabolism (e.g., MCAD |
| carbohydrate disorders, | | | deficiency), Urea Cycle |
| mitochondrial disorders | | | disorders (e.g., |
| | | | Citrullinemia), Organic |
| | | | acidemias (e.g., Maple |
| | | | Syrup Urine disease), |
| | | | Mitochondrial disorders |
| | | | (e.g., MELAS), peroxisomal |
| | | | disorders (e.g., Zellweger |
| | | | syndrome) |
| Inflammation | Various | | IL-10; IL-1 (IL-la; IL-1b); |
| | | | IL-13; IL-17 (IL-17a |
| | | | (CTLA8); IL- |
| | | | 17b; IL-17c; IL-17d; IL- |
| | | | 17f); II-23; Cx3cr1; ptpn22; |
| | | | TNFa; |
| | | | NOD2/CARD15 for IBD; |
| | | | IL-6; IL-12 (IL-12a; IL- |
| | | | 12b); |
| | | | CTLA4; Cx3cl1 |
| Inflammatory Bowel | Gastrointestinal | Joints, skin | NOD2, IRGM, LRRK2, |
| Diseases (e.g., Ulcerative | | | ATG5, ATG16L1, IRGM, |
| Colitis and Chron's | | | GATM, ECM1, CDH1, |
| Disease) | | | LAMB1, HNF4A, GNA12, |
| | | | IL10, CARD9/15. CCR6, |
| | | | IL2RA, MST1, TNFSF15, |
| | | | REL, STAT3, IL23R, |
| | | | IL12B, FUT2 |
| Interstitial renal fibrosis | kidney | | TGF-β type II receptor |
| Job's Syndrome (aka | Immune System | | STAT3, DOCK8 |
| Hyper IgE Syndrome) | | | |
| Juvenile Retinoschisis | eye | | RS1, XLRS1 |
| Kabuki Syndrome 1 | | | MLL4, KMT2D |
| Kennedy Disease (aka | Muscles, brain, | | SBMA/SMAX1/AR |
| Spinobulbar Muscular | nervous system | | |
| Atrophy) | | | |
| Klinefelter syndrome | Various- | | Extra X chromosome in |
| | particularly | | males |
| | those involved | | |
| | in development | | |
| | of male | | |
| | characteristics | | |
| Lafora Disease | Brain, CNS | | EMP2A and EMP2B |
| Leber Congenital | eye | | CRB1, RP12, CORD2, |
| Amaurosis | | | CRD, CRX, IMPDH1, |
| | | | OTX2, AIPL1, CABP4, |
| | | | CCT2, CEP290, CLUAP1, |
| | | | CRB1, CRX, DTHD1, |
| | | | GDF6, GUCY2D, IFT140, |
| | | | IQCB1, KCNJ13, LCA5, |
| | | | LRAT, NMNAT1, PRPH2, |
| | | | RD3, RDH12, RPE65, |
| | | | RP20, RPGRIP1, SPATA7, |
| | | | TULP1, LCA1, LCA4, |
| | | | GUC2D, CORD6, LCA3, |
| Lesch-Nyhan Syndrome | Metabolism | Various - joints, | HPRT1 |
| | disease | cognitive, brain, | |
| | | nervous system | |
| Leukocyte deficiencies | blood | | ITGB2, CD18, LCAMB, |
| and disorders | | | LAD, EIF2B1, EIF2BA, |
| | | | EIF2B2, EIF2B3, EIF2B5, |
| | | | LVWM, CACH, CLE, |
| | | | EIF2B4 |
| Leukemia | Blood | | TAL1, TCL5, SCL, TAL2, |
| | | | FLT3, NBS1, NBS, |
| | | | ZNFN1A1, IK1, LYF1, |
| | | | HOXD4, HOX4B, BCR, |
| | | | CML, PHL, ALL, ARNT, |
| | | | KRAS2, RASK2, GMPS, |
| | | | AF10, ARHGEF12, LARG, |
| | | | KIAA0382, CALM, CLTH, |
| | | | CEBPA, CEBP, CHIC2, |
| | | | BTL, FLT3, KIT, PBT, |
| | | | LPP, NPM1, NUP214, |
| | | | D9S46E, CAN, CAIN, |
| | | | RUNX1, CBFA2, AML1, |
| | | | WHSC1L1, NSD3, FLT3, |
| | | | AF1Q, NPM1, NUMA1, |
| | | | ZNF145, PLZF, PML, |
| | | | MYL, STAT5B, AF10, |
| | | | CALM, CLTH, ARL11, |
| | | | ARLTS1, P2RX7, P2X7, |
| | | | BCR, CML, PHL, ALL, |
| | | | GRAF, NF1, VRNF, WSS, |
| | | | NFNS, PTPN11, PTP2C, |
| | | | SHP2, NS1, BCL2, CCND1, |
| | | | PRAD1, BCL1, TCRA, |
| | | | GATA1, GF1, ERYF1, |
| | | | NFE1, ABL1, NQO1, DIA4, |
| | | | NMOR1, NUP214, |
| | | | D9S46E, CAN, CAIN |
| Limb-girdle muscular | muscle | | LGMD |
| dystrophy diseases | | | |
| Lowe syndrome | brain, eyes, | | OCRL |
| | kidneys | | |
| Lupus glomerulo- | kidney | | MAPK1 |
| nephritis | | | |
| Machado- | Brain, CNS, | | ATX3 |
| Joseph's Disease (also | muscle | | |
| known as Spinocerebellar | | | |
| ataxia Type 3) | | | |
| Macular degeneration | eye | | ABC4, CBC1, CHM1, |
| | | | APOE, C1QTNF5, C2, C3, |
| | | | CCL2, CCR2, CD36, CFB, |
| | | | CFH, CFHR1, CFHR3, |
| | | | CNGB3, CP, CRP, CST3, |
| | | | CTSD, CX3CR1, ELOVL4, |
| | | | ERCC6, FBLN5, FBLN6, |
| | | | FSCN2, HMCN1, HTRA1, |
| | | | IL6, IL8, PLEKHA1, |
| | | | PROM1, PRPH2, RPGR, |
| | | | SERPING1, TCOF1, |
| | | | TIMP3, TLR3 |
| Macular Dystrophy | eye | | BEST1, C1QTNF5, |
| | | | CTNNA1, EFEMP1, |
| | | | ELOVL4, FSCN2, |
| | | | GUCA1B, HMCN1, |
| | | | IMPG1, OTX2, PRDM13, |
| | | | PROM1, PRPH2, RP1L1, |
| | | | TIMP3, ABCA4, CFH, |
| | | | DRAM2, IMG1, MFSD8, |
| | | | ADMD, STGD2, STGD3, |
| | | | RDS, RP7, PRPH, AVMD, |
| | | | AOFMD, VMD2 |
| Malattia Leventinese | eye | | EFEMP1, FBLN3 |
| Maple Syrup Urine | Metabolism | | BCKDHA, BCKDHB, and |
| Disease | disease | | DBT |
| Marfan syndrome | Connective | Musculoskeletal | FBN1 |
| | tissue | | |
| Maroteaux-Lamy | Musculoskeletal | Liver, spleen | ARSB |
| Syndrome (aka MPS VI) | system, nervous | | |
| | system | | |
| McArdle's Disease | Glycogen | muscle | PYGM |
| (Glycogen Storage | storage disease | | |
| Disease Type V) | | | |
| Medullary cystic kidney | kidney | | UMOD, HNFJ, FJHN, |
| disease | | | MCKD2, ADMCKD2 |
| Metachromatic | Lysosomal | Nervous system | ARSA |
| leukodystrophy | storage disease | | |
| Methylmalonic acidemia | Metabolism | | MMAA, MMAB, MUT, |
| (MMA) | disease | | MMACHC, MMADHC, |
| | | | LMBRD1 |
| Morquio Syndrome (aka | Connective | heart | GALNS |
| MPS IV A and B) | tissue, skin, | | |
| | bone, eyes | | |
| Mucopolysaccharidosis | Lysosomal | | See also Hurler/Scheie |
| diseases (Types I H/S, I | storage disease | | syndrome, Hurler disease, |
| H, II, III A B and C, I S, | - affects various | | Sanfilippo syndrome, Scheie |
| IVA and B, IX, VII, and | organs/tissues | | syndrome, Morquio |
| VI) | | | syndrome, hyaluronidase |
| | | | deficiency, Sly syndrome, |
| | | | and Maroteaux-Lamy |
| | | | syndrome |
| Muscular Atrophy | muscle | | VAPB, VAPC, ALS8, |
| | | | SMN1, SMA1, SMA2, |
| | | | SMA3, SMA4, BSCL2, |
| | | | SPG17, GARS, SMAD1, |
| | | | CMT2D, HEXB, |
| | | | IGHMBP2, SMUBP2, |
| | | | CATF1, SMARD1 |
| Muscular dystrophy | muscle | | FKRP, MDC1C, LGMD2I, |
| | | | LAMA2, LAMM, LARGE, |
| | | | KIAA0609, MDC1D, |
| | | | FCMD, TTID, MYOT, |
| | | | CAPN3, CANP3, DYSF, |
| | | | LGMD2B, SGCG, |
| | | | LGMD2C, DMDA1, SCG3, |
| | | | SGCA, ADL, DAG2, |
| | | | LGMD2D, DMDA2, SGCB, |
| | | | LGMD2E, SGCD, SGD, |
| | | | LGMD2F, CMD1L, TCAP, |
| | | | LGMD2G, CMD1N, |
| | | | TRIM32, HT2A, LGMD2H, |
| | | | FKRP, MDC1C, LGMD2I, |
| | | | TTN, CMD1G, TMD, |
| | | | LGMD2J, POMT1, CAV3, |
| | | | LGMD1C, SEPN1, SELN, |
| | | | RSMD1, PLEC1, PLTN, |
| | | | EBS1 |
| Myotonic dystrophy | Muscles | Eyes, heart, | CNBP (Type 2) and DMPK |
| (Type 1 and Type 2) | | endocrine | (Type 1) |
| Neoplasia | | | PTEN; ATM; ATR; EGFR; |
| | | | ERBB2; ERBB3; ERBB4; |
| | | | Notch1; Notch2; Notch3; |
| | | | Notch4; AKT; AKT2; |
| | | | AKT3; HIF; |
| | | | HIF1a; HIF3a; Met; HRG; |
| | | | Bcl2; PPAR alpha; PPAR |
| | | | gamma; WT1 (Wilms |
| | | | Tumor); FGF Receptor |
| | | | Family |
| | | | members (5 members: 1, 2, |
| | | | 3, 4, 5); CDKN2a; APC; RB |
| | | | (retinoblastoma); MEN1; |
| | | | VHL; BRCA1; BRCA2; AR |
| | | | (Androgen Receptor); |
| | | | TSG101; IGF; IGF |
| | | | Receptor; Igf1 (4 |
| | | | variants); Igf2 (3 variants); |
| | | | Igf 1 Receptor; Igf 2 |
| | | | Receptor; |
| | | | Bax; Bcl2; caspases family |
| | | | (9 members: |
| | | | 1, 2, 3, 4, 6, 7, 8, 9, 12); |
| | | | Kras; Apc |
| Neurofibromatosis (NF) | brain, spinal | | NF1, NF2 |
| (NF1, formerly | cord, nerves, | | |
| Recklinghausen's NF, and | and skin | | |
| NF2) | | | |
| Niemann-Pick Lipidosis | Lysosomal | Various- where | Types A and B: SMPD1; |
| (Types A, B, and C) | Storage Disease | sphingomyelin | Type C: NPC1 or NPC2 |
| | | accumulates, | |
| | | particularly | |
| | | spleen, liver, | |
| | | blood, CNS | |
| Noonan Syndrome | Various - | | PTPN11, SOS1, RAF1 and |
| | musculoskeletal, | | KRAS |
| | heart, eyes, | | |
| | reproductive | | |
| | organs, blood | | |
| Norrie Disease or X- | eye | | NDP |
| linked Familial Exudative | | | |
| Vitreoretinopathy | | | |
| North Carolina Macular | eye | | MCDR1 |
| Dystrophy | | | |
| Osteogenesis imperfecta | bones, | | COL1A1, COL1A2, |
| (OI) (Types I, II, III, IV, | musculoskeletal | | CRTAP, P3H |
| V, VI, VII) | | | |
| Osteopetrosis | bones | | LRP5, BMND1, LRP7, |
| | | | LR3, OPPG, VBCH2, |
| | | | CLCN7, CLC7, OPTA2, |
| | | | OSTM1, GL, TCIRG1, |
| | | | TIRC7, OC116, OPTB1 |
| Patau's Syndrome | Brain, heart, | | Additional copy of |
| (Trisomy 13) | skeletal system | | chromosome 13 |
| Parkinson's disease (PD) | Brain, nervous | | SNCA (PARK1), UCHL1 |
| | system | | (PARK 5), and LRRK2 |
| | | | (PARK8), (PARK3), |
| | | | PARK2, PARK4, PARK7 |
| | | | (PARK7), PINK1 (PARK6); |
| | | | x-Synuclein, DJ-1, Parkin, |
| | | | NR4A2, NURR1, NOT, |
| | | | TINUR, SNCAIP, TBP, |
| | | | SCA17, NCAP, PRKN, |
| | | | PDJ, DBH, NDUFV2 |
| Pattern Dystrophy of the | eye | | RDS/peripherin |
| RPE | | | |
| Phenylketonuria (PKU) | Metabolism | Various due to | PAH, PKU1, QDPR, DHPR, |
| | disorder | build-up of | PTS |
| | | phenylalanine, | |
| | | phenyl ketones | |
| | | in tissues and | |
| | | CNS | |
| Polycystic kidney and | Kidney, liver | | FCYT, PKHD1, ARPKD, |
| hepatic disease | | | PKD1, PKD2, PKD4, |
| | | | PKDTS, PRKCSH, G19P1, |
| | | | PCLD, SEC63 |
| Pompe Disease | Glycogen | Various - heart, | GAA |
| | storage disease | liver, spleen | |
| Porphyria (actually refers | Various- | | ALAD, ALAS2, CPOX, |
| to a group of different | wherever heme | | FECH, HMBS, PPOX, |
| diseases all having a | precursors | | UROD, or UROS |
| specific heme production | accumulate | | |
| process abnormality) | | | |
| posterior polymorphous | eyes | | TCF4; COL8A2 |
| corneal dystrophy | | | |
| Primary Hyperoxaluria | Various - eyes, | | LDHA (lactate |
| (e.g., type 1) | heart, kidneys, | | dehydrogenase A) and |
| | skeletal system | | hydroxyacid oxidase 1 |
| | | | (HAO1) |
| Primary Open Angle | eyes | | MYOC |
| Glaucoma (POAG) | | | |
| Primary sclerosing | Liver, | | TCF4; COL8A2 |
| cholangitis | gallbladder | | |
| Progeria (also called | All | | LMNA |
| Hutchinson-Gilford | | | |
| progeria syndrome) | | | |
| Prader-Willi Syndrome | Musculoskeletal | | Deletion of region of short |
| | system, brain, | | arm of chromosome 15, |
| | reproductive | | including UBE3A |
| | and endocrine | | |
| | system | | |
| Prostate Cancer | prostate | | HOXB13, MSMB, |
| | | | GPRC6A, TP53 |
| Pyruvate Dehydrogenase | Brain, nervous | | PDHA1 |
| Deficiency | system | | |
| Kidney/Renal carcinoma | kidney | | RLIP76, VEGF |
| Rett Syndrome | Brain | | MECP2, RTT, PPMX, |
| | | | MRX16, MRX79, CDKL5, |
| | | | STK9, MECP2, RTT, |
| | | | PPMX, MRX16, MRX79, x- |
| | | | Synuclein, DJ-1 |
| Retinitis pigmentosa (RP) | eye | | ADIPOR1, ABCA4, |
| | | | AGBL5, ARHGEF18, |
| | | | ARL2BP, ARL3, ARL6, |
| | | | BEST1, BBS1, BBS2, |
| | | | C2ORF71, C8ORF37, CA4, |
| | | | CERKL, CLRN1, CNGA1, |
| | | | CMGB1, CRB1, CRX, |
| | | | CYP4V2, DHDDS, DHX38, |
| | | | EMC1, EYS, FAM161A, |
| | | | FSCN2, GPR125, |
| | | | GUCA1B, HK1, HPRPF3, |
| | | | HGSNAT, IDH3B, |
| | | | IMPDH1, IMPG2, IFT140, |
| | | | IFT172, KLHL7, |
| | | | KIAA1549, KIZ, LRAT, |
| | | | MAK, MERTK, MVK, |
| | | | NEK2, NUROD1, NR2E3, |
| | | | NRL, OFD1, PDE6A, |
| | | | PDE6B, PDE6G, |
| | | | POMGNT1, PRCD, |
| | | | PROM1, PRPF3, PRPF4, |
| | | | PRPF6, PRPF8, PRPF31, |
| | | | PRPH2, RPB3, RDH12, |
| | | | REEP6, RP39, RGR, RHO, |
| | | | RLBP1, ROM1, RP1, |
| | | | RP1L1, RPY, RP2, RP9, |
| | | | RPE65, RPGR, SAMD11, |
| | | | SAG, SEMA4A, SLC7A14, |
| | | | SNRNP200, SPP2, |
| | | | SPATA7, TRNT1, |
| | | | TOPORS, TTC8, TULP1, |
| | | | USH2A, ZFN408, ZNF513, |
| | | | see also 20120204282 |
| Scheie syndrome (also | Various- liver, | | IDUA, α-L-iduronidase |
| known as | spleen, eye, | | |
| mucopolysaccharidosis | joint, heart, | | |
| type I S(MPS I-S)) | brain, skeletal | | |
| Schizophrenia | Brain | | Neuregulin1 (Nrg1); Erb4 |
| | | | (receptor for Neuregulin); |
| | | | Complexin1 (Cplx1); Tph1 |
| | | | Tryptophan hydroxylase; |
| | | | Tph2 |
| | | | Tryptophan hydroxylase 2; |
| | | | Neurexin 1; GSK3; GSK3a; |
| | | | GSK3b; 5-HTT (Slc6a4); |
| | | | COMT; DRD (Drd1a); |
| | | | SLC6A3; DAOA; DTNBP1; |
| | | | Dao (Dao1); TCF4; |
| | | | COL8A2 |
| | | | APH-1 (alpha and beta); |
| | | | PSEN1; NCSTN; PEN-2; |
| | | | Nos1, Parp1, Nat1, Nat2, |
| | | | CTSB, APP, APH1B, |
| | | | PSEN2, PSENEN, BACE1, |
| | | | ITM2B, CTSD, NOTCH1, |
| | | | TNF, INS, DYT10, |
| | | | ADAM17, APOE, ACE, |
| Secretase Related | Various | | STN, TP53, IL6, NGFR, |
| Disorders | | | IL1B, ACHE, CTNNB1, |
| | | | IGF1, IFNG, NRG1, |
| | | | CASP3, MAPK1, CDH1, |
| | | | APBB1, HMGCR, CREB1, |
| | | | PTGS2, HES1, CAT, |
| | | | TGFB1, ENO2, ERBB4, |
| | | | TRAPPC10, MAOB, NGF, |
| | | | MMP12, JAG1, CD40LG, |
| | | | PPARG, FGF2, LRP1, |
| | | | NOTCH4, MAPK8, PREP, |
| | | | NOTCH3, PRNP, CTSG, |
| | | | EGF, REN, CD44, SELP, |
| | | | GHR, ADCYAP1, INSR, |
| | | | GFAP, MMP3, MAPK10, |
| | | | SP1, MYC, CTSE, PPARA, |
| | | | JUN, TIMP1, IL5, IL1A, |
| | | | MMP9, HTR4, HSPG2, |
| | | | KRAS, CYCS, SMG1, |
| | | | IL1R1, PROK1, MAPK3, |
| | | | NTRK1, IL13, MME, TKT, |
| | | | CXCR2, CHRM1, |
| | | | ATXN1, PAWR, NOTCJ2, |
| | | | M6PR, CYP46A1, |
| | | | CSNK1D, MAPK14, PRG2, |
| | | | PRKCA, L1 CAM, CD40, |
| | | | NR1I2, JAG2, CTNND1, |
| | | | CMA1, SORT1, DLK1, |
| | | | THEM4, JUP, CD46, |
| | | | CCL11, CAV3, RNASE3, |
| | | | HSPA8, CASP9, CYP3A4, |
| | | | CCR3, TFAP2A, SCP2, |
| | | | CDK4, JOF1A, TCF7L2, |
| | | | B3GALTL, MDM2, RELA, |
| | | | CASP7, IDE, FANP4, |
| | | | CASK, ADCYAP1R1, |
| | | | ATF4, PDGFA, C21ORF33, |
| | | | SCG5, RMF123, NKFB1, |
| | | | ERBB2, CAV1, MMP7, |
| | | | TGFA, RXRA, STX1A, |
| | | | PSMC4, P2RY2, |
| | | | TNFRSF21, DLG1, |
| | | | NUMBL, SPN, PLSCR1, |
| | | | UBQLN2, UBQLN1, |
| | | | PCSK7, SPON1, SILV, |
| | | | QPCT, HESS, GCC1 |
| Selective IgA Deficiency | Immune system | | Type 1: MSH5; Type 2: |
| | | | TNFRSF13B |
| Severe Combined | Immune system | | JAK3, JAKL, DCLRE1C, |
| Immunodeficiency | | | ARTEMIS, SCIDA, RAG1, |
| (SCID) and SCID-X1, | | | RAG2, ADA, PTPRC, |
| and ADA-SCID | | | CD45, LCA, IL7R, CD3D, |
| | | | T3D, IL2RG, SCIDX1, |
| | | | SCIDX, IMD4, those |
| | | | identified in U.S. Pat. App. |
| | | | Pub. 20110225664, |
| | | | 20110091441, |
| | | | 20100229252, 20090271881 |
| | | | and 20090222937; |
| Sickle cell disease | blood | | HBB, BCL11A, BCL11Ae, |
| | | | cis-regulatory elements of |
| | | | the B-globin locus, HBG 1/2 |
| | | | promoter, HBG distal |
| | | | CCAAT box region between −92 |
| | | | and −130 of the HBG |
| | | | Transcription Start Site, |
| | | | those described in |
| | | | WO2015148863, WO |
| | | | 2013/126794, U.S. Pat. Pub. |
| | | | 20110182867 |
| Sly Syndrome (aka MPS | | | GUSB |
| VII) | | | |
| Spinocerebellar Ataxias | | | ATXN1, ATXN2, ATX3 |
| (SCA types 1, 2, 3, 6, 7, | | | |
| 8, 12 and 17) | | | |
| Sorsby Fundus Dystrophy | eye | | TIMP3 |
| Stargardt disease | eye | | ABCR, ELOVL4, ABCA4, |
| | | | PROM1 |
| Tay-Sachs Disease | Lysosomal | Various - CNS, | HEX-A |
| | Storage disease | brain, eye | |
| Thalassemia (Alpha, | blood | | HBA1, HBA2 (Alpha), |
| Beta, Delta) | | | HBB (Beta), HBB and HBD |
| | | | (delta), LCRB, BCL11A, |
| | | | BCL11Ae, cis-regulatory |
| | | | elements of the B-globin |
| | | | locus, HBG 1/2 promoter, |
| | | | those described in |
| | | | WO2015148860, U.S. Pat. |
| | | | Pub. 20110182867, |
| | | | 2015/148860 |
| Thymic Aplasia | Immune system, | | deletion of 30 to 40 genes in |
| (DiGeorge | thymus | | the middle of chromosome |
| Syndrome;22q11.2 | | | 22 at a location known |
| deletion syndrome) | | | as 22q11.2, including TBX1, |
| | | | DGCR8 |
| Transthyretin amyloidosis | liver | | TTR (transthyretin) |
| (ATTR) | | | |
| trimethylaminuria | Metabolism | | FMO3 |
| | disease | | |
| Trinucleotide Repeat | Various | | HTT; SBMA/SMAX1/AR; |
| Disorders (generally) | | | FXN/X25 ATX3; |
| | | | ATXN1; ATXN2; |
| | | | DMPK; Atrophin-1 and |
| | | | Atn1 |
| | | | (DRPLA Dx); CBP (Creb- |
| | | | BP - global instability); |
| | | | VLDLR; Atxn7; Atxn10; |
| | | | FEN1, TNRC6A, PABPN1, |
| | | | JPH3, MED15, ATXN1, |
| | | | ATXN3, TBP, CACNA1A, |
| | | | ATXN80S, PPP2R2B, |
| | | | ATXN7, TNRC6B, |
| | | | TNRC6C, CELF3, |
| | | | MAB21L1, MSH2, |
| | | | TMEM185A, SIX5, |
| | | | CNPY3, RAXE, GNB2, |
| | | | RPL14, ATXN8, ISR, TTR, |
| | | | EP400, GIGYF2, OGG1, |
| | | | STC1, CNDP1, C10ORF2, |
| | | | MAML3, DKC1, PAXIP1, |
| | | | CASK, MAPT, SP1, POLG, |
| | | | AFF2, THBS1, TP53, |
| | | | ESR1, CGGBP1, ABT1, |
| | | | KLK3, PRNP, JUN, |
| | | | KCNN3, BAX, FRAXA, |
| | | | KBTBD10, MBNL1, |
| | | | RAD51, NCOA3, ERDA1, |
| | | | TSC1, COMP, GGLC, |
| | | | RRAD, MSH3, DRD2, |
| | | | CD44, CTCF, CCND1, |
| | | | CLSPN, MEF2A, PTPRU, |
| | | | GAPDH, TRIM22, WT1, |
| | | | AHR, GPX1, TPMT, NDP, |
| | | | ARX, TYR, EGR1, UNG, |
| | | | NUMBL, FABP2, EN2, |
| | | | CRYGC, SRP14, CRYGB, |
| | | | PDCD1, HOXA1, ATXN2L, |
| | | | PMS2, GLA, CBL, FTH1, |
| | | | IL12RB2, OTX2, HOXA5, |
| | | | POLG2, DLX2, AHRR, |
| | | | MANF, RMEM158, see also |
| | | | 20110016540 |
| Turner's Syndrome (XO) | Various - | | Monosomy X |
| | reproductive | | |
| | organs, and sex | | |
| | characteristics, | | |
| | vasculature | | |
| Tuberous Sclerosis | CNS, heart, | | TSC1, TSC2 |
| | kidneys | | |
| Usher syndrome (Types I, | Ears, eyes | | ABHD12, CDH23, CIB2, |
| II, and III) | | | CLRN1, DFNB31, GPR98, |
| | | | HARS, MYO7A, PCDH15, |
| | | | USH1C, USH1G, USH2A, |
| | | | USH11A, those described in |
| | | | WO2015134812A1 |
| Velocardiofacial | Various - | | Many genes are deleted, |
| syndrome (aka 22q11.2 | skeletal, heart, | | COM, TBX1, and other are |
| deletion syndrome, | kidney, immune | | associated with symptoms |
| DiGeorge syndrome, | system, brain | | |
| conotruncal anomaly face | | | |
| syndrome (CTAF), | | | |
| autosomal dominant | | | |
| Opitz G/BB syndrome or | | | |
| Cayler cardio-facial | | | |
| syndrome) | | | |
| Von Gierke's Disease | Glycogen | Various - liver, | G6PC and SLC37A4 |
| (Glycogen Storage | Storage disease | kidney | |
| Disease type I) | | | |
| Von Hippel-Lindau | Various - cell | CNS, Kidney, | VHL |
| Syndrome | growth | Eye, visceral | |
| | regulation | organs | |
| | disorder | | |
| Von Willebrand Disease | blood | | VWF |
| (Types I, II and III) | | | |
| Wilson Disease | Various - | Liver, brains, | ATP7B |
| | Copper Storage | eyes, other | |
| | Disease | tissues where | |
| | | copper builds up | |
| Wiskott-Aldrich | Immune System | | WAS |
| Syndrome | | | |
| Xeroderma Pigmentosum | Skin | Nervous system | POLH |
| XXX Syndrome | Endocrine, brain | | X chromosome trisomy |

TABLE 3
Exemplary Genes controlling Cellular Functions

| CELLULAR | |
|---|---|
| FUNCTION | GENES |
| PI3K/AKT Signaling | PRKCE; ITGAM; ITGA5; IRAK1; PRKAA2; EIF2AK2; |
| | PTEN; EIF4E; PRKCZ; GRK6; MAPK1; TSC1; PLK1; |
| | AKT2; IKBKB; PIK3CA; CDK8; CDKN1B; NFKB2; BCL2; |
| | PIK3CB; PPP2R1A; MAPK8; BCL2L1; MAPK3; TSC2; |
| | ITGA1; KRAS; EIF4EBP1; RELA; PRKCD; NOS3; |
| | PRKAA1; MAPK9; CDK2; PPP2CA; PIM1; ITGB7; |
| | YWHAZ; ILK; TP53; RAF1; IKBKG; RELB; DYRK1A; |
| | CDKN1A; ITGB1; MAP2K2; JAK1; AKT1; JAK2; PIK3R1; |
| | CHUK; PDPK1; PPP2R5C; CTNNB1; MAP2K1; NFKB1; |
| | PAK3; ITGB3; CCND1; GSK3A; FRAP1; SFN; ITGA2; |
| | TTK; CSNK1A1; BRAF; GSK3B; AKT3; FOXO1; SGK; |
| | HSP90AA1; RPS6KB1 |
| ERK/MAPK Signaling | PRKCE; ITGAM; ITGA5; HSPB1; IRAK1; PRKAA2; |
| | EIF2AK2; RAC1; RAP1A; TLN1; EIF4E; ELK1; GRK6; |
| | MAPK1; RAC2; PLK1; AKT2; PIK3CA; CDK8; CREB1; |
| | PRKCI; PTK2; FOS; RPS6KA4; PIK3CB; PPP2R1A; |
| | PIK3C3; MAPK8; MAPK3; ITGA1; ETS1; KRAS; MYCN; |
| | EIF4EBP1; PPARG; PRKCD; PRKAA1; MAPK9; SRC; |
| | CDK2; PPP2CA; PIM1; PIK3C2A; ITGB7; YWHAZ; |
| | PPP1CC; KSR1; PXN; RAF1; FYN; DYRK1A; ITGB1; |
| | MAP2K2; PAK4; PIK3R1; STAT3; PPP2R5C; MAP2K1; |
| | PAK3; ITGB3; ESR1; ITGA2; MYC; TTK; CSNK1A1; |
| | CRKL; BRAF; ATF4; PRKCA; SRF; STAT1; SGK |
| Glucocorticoid | RAC1; TAF4B; EP300; SMAD2; TRAF6; PCAF; ELK1; |
| Receptor | MAPK1; SMAD3; AKT2; IKBKB; NCOR2; UBE2I; |
| Signaling | PIK3CA; CREB1; FOS; HSPA5; NFKB2; BCL2; |
| | MAP3K14; STAT5B; PIK3CB; PIK3C3; MAPK8; BCL2L1; |
| | MAPK3; TSC22D3; MAPK10; NRIP1; KRAS; MAPK13; |
| | RELA; STAT5A; MAPK9; NOS2A; PBX1; NR3C1; |
| | PIK3C2A; CDKN1C; TRAF2; SERPINE1; NCOA3; |
| | MAPK14; TNF; RAF1; IKBKG; MAP3K7; CREBBP; |
| | CDKN1A; MAP2K2; JAK1; IL8; NCOA2; AKT1; JAK2; |
| | PIK3R1; CHUK; STAT3; MAP2K1; NFKB1; TGFBR1; |
| | ESR1; SMAD4; CEBPB; JUN; AR; AKT3; CCL2; MMP1; |
| | STAT1; IL6; HSP90AA1 |
| Axonal Guidance | PRKCE; ITGAM; ROCK1; ITGA5; CXCR4; ADAM12; |
| Signaling | IGF1; RAC1; RAP1A; EIF4E; PRKCZ; NRP1; NTRK2; |
| | ARHGEF7; SMO; ROCK2; MAPK1; PGF; RAC2; |
| | PTPN11; GNAS; AKT2; PIK3CA; ERBB2; PRKCI; PTK2; |
| | CFL1; GNAQ; PIK3CB; CXCL12; PIK3C3; WNT11; |
| | PRKD1; GNB2L1; ABL1; MAPK3; ITGA1; KRAS; RHOA; |
| | PRKCD; PIK3C2A; ITGB7; GLI2; PXN; VASP; RAF1; |
| | FYN; ITGB1; MAP2K2; PAK4; ADAM17; AKT1; PIK3R1; |
| | GLI1; WNT5A; ADAM10; MAP2K1; PAK3; ITGB3; |
| | CDC42; VEGFA; ITGA2; EPHA8; CRKL; RND1; GSK3B; |
| | AKT3; PRKCA |
| Ephrin Receptor | PRKCE; ITGAM; ROCK1; ITGA5; CXCR4; IRAK1; |
| Signaling | PRKAA2; EIF2AK2; RAC1; RAP1A; GRK6; ROCK2; |
| Actin Cytoskeleton | MAPK1; PGF; RAC2; PTPN11; GNAS; PLK1; AKT2; |
| Signaling | DOK1; CDK8; CREB1; PTK2; CFL1; GNAQ; MAP3K14; |
| | CXCL12; MAPK8; GNB2L1; ABL1; MAPK3; ITGA1; |
| | KRAS; RHOA; PRKCD; PRKAA1; MAPK9; SRC; CDK2; |
| | PIM1; ITGB7; PXN; RAF1; FYN; DYRK1A; ITGB1; |
| | MAP2K2; PAK4; AKT1; JAK2; STAT3; ADAM10; |
| | MAP2K1; PAK3; ITGB3; CDC42; VEGFA; ITGA2; |
| | EPHA8; TTK; CSNK1A1; CRKL; BRAF; PTPN13; ATF4; |
| | AKT3; SGK |
| | ACTN4; PRKCE; ITGAM; ROCK1; ITGA5; IRAK1; |
| | PRKAA2; EIF2AK2; RAC1; INS; ARHGEF7; GRK6; |
| | ROCK2; MAPK1; RAC2; PLK1; AKT2; PIK3CA; CDK8; |
| | PTK2; CFL1; PIK3CB; MYH9; DIAPH1; PIK3C3; MAPK8; |
| | F2R; MAPK3; SLC9A1; ITGA1; KRAS; RHOA; PRKCD; |
| | PRKAA1; MAPK9; CDK2; PIM1; PIK3C2A; ITGB7; |
| | PPP1CC; PXN; VIL2; RAF1; GSN; DYRK1A; ITGB1; |
| | MAP2K2; PAK4; PIP5K1A; PIK3R1; MAP2K1; PAK3; |
| | ITGB3; CDC42; APC; ITGA2; TTK; CSNK1A1; CRKL; |
| | BRAF; VAV3; SGK |
| Huntington's Disease | PRKCE; IGF1; EP300; RCOR1; PRKCZ; HDAC4; TGM2; |
| Signaling | MAPK1; CAPNS1; AKT2; EGFR; NCOR2; SP1; CAPN2; |
| | PIK3CA; HDAC5; CREB1; PRKCI; HSPA5; REST; |
| | GNAQ; PIK3CB; PIK3C3; MAPK8; IGF1R; PRKD1; |
| | GNB2L1; BCL2L1; CAPN1; MAPK3; CASP8; HDAC2; |
| | HDAC7A; PRKCD; HDAC11; MAPK9; HDAC9; PIK3C2A; |
| | HDAC3; TP53; CASP9; CREBBP; AKT1; PIK3R1; |
| | PDPK1; CASP1; APAF1; FRAP1; CASP2; JUN; BAX; |
| | ATF4; AKT3; PRKCA; CLTC; SGK; HDAC6; CASP3 |
| Apoptosis Signaling | PRKCE; ROCK1; BID; IRAK1; PRKAA2; EIF2AK2; BAK1; |
| | BIRC4; GRK6; MAPK1; CAPNS1; PLK1; AKT2; IKBKB; |
| | CAPN2; CDK8; FAS; NFKB2; BCL2; MAP3K14; MAPK8; |
| | BCL2L1; CAPN1; MAPK3; CASP8; KRAS; RELA; |
| | PRKCD; PRKAA1; MAPK9; CDK2; PIM1; TP53; TNF; |
| | RAF1; IKBKG; RELB; CASP9; DYRK1A; MAP2K2; |
| | CHUK; APAF1; MAP2K1; NFKB1; PAK3; LMNA; CASP2; |
| | BIRC2; TTK; CSNK1A1; BRAF; BAX; PRKCA; SGK; |
| | CASP3; BIRC3; PARP1 |
| B Cell Receptor | RAC1; PTEN; LYN; ELK1; MAPK1; RAC2; PTPN11; |
| Signaling | AKT2; IKBKB; PIK3CA; CREB1; SYK; NFKB2; CAMK2A; |
| | MAP3K14; PIK3CB; PIK3C3; MAPK8; BCL2L1; ABL1; |
| | MAPK3; ETS1; KRAS; MAPK13; RELA; PTPN6; MAPK9; |
| | EGR1; PIK3C2A; BTK; MAPK14; RAF1; IKBKG; RELB; |
| | MAP3K7; MAP2K2; AKT1; PIK3R1; CHUK; MAP2K1; |
| | NFKB1; CDC42; GSK3A; FRAP1; BCL6; BCL10; JUN; |
| | GSK3B; ATF4; AKT3; VAV3; RPS6KB1 |
| Leukocyte | ACTN4; CD44; PRKCE; ITGAM; ROCK1; CXCR4; CYBA; |
| Extravasation | RAC1; RAP1A; PRKCZ; ROCK2; RAC2; PTPN11; |
| Signaling | MMP14; PIK3CA; PRKCI; PTK2; PIK3CB; CXCL12; |
| | PIK3C3; MAPK8; PRKD1; ABL1; MAPK10; CYBB; |
| | MAPK13; RHOA; PRKCD; MAPK9; SRC; PIK3C2A; BTK; |
| | MAPK14; NOX1; PXN; VIL2; VASP; ITGB1; MAP2K2; |
| | CTNND1; PIK3R1; CTNNB1; CLDN1; CDC42; F11R; ITK; |
| | CRKL; VAV3; CTTN; PRKCA; MMP1; MMP9 |
| Integrin Signaling | ACTN4; ITGAM; ROCK1; ITGA5; RAC1; PTEN; RAP1A; |
| | TLN1; ARHGEF7; MAPK1; RAC2; CAPNS1; AKT2; |
| | CAPN2; PIK3CA; PTK2; PIK3CB; PIK3C3; MAPK8; |
| | CAV1; CAPN1; ABL1; MAPK3; ITGA1; KRAS; RHOA; |
| | SRC; PIK3C2A; ITGB7; PPP1CC; ILK; PXN; VASP; |
| | RAF1; FYN; ITGB1; MAP2K2; PAK4; AKT1; PIK3R1; |
| | TNK2; MAP2K1; PAK3; ITGB3; CDC42; RND3; ITGA2; |
| | CRKL; BRAF; GSK3B; AKT3 |
| Acute Phase Response | IRAK1; SOD2; MYD88; TRAF6; ELK1; MAPK1; PTPN11; |
| Signaling | AKT2; IKBKB; PIK3CA; FOS; NFKB2; MAP3K14; |
| | PIK3CB; MAPK8; RIPK1; MAPK3; IL6ST; KRAS; |
| | MAPK13; IL6R; RELA; SOCS1; MAPK9; FTL; NR3C1; |
| | TRAF2; SERPINE1; MAPK14; TNF; RAF1; PDK1; |
| | IKBKG; RELB; MAP3K7; MAP2K2; AKT1; JAK2; PIK3R1; |
| | CHUK; STAT3; MAP2K1; NFKB1; FRAP1; CEBPB; JUN; |
| | AKT3; IL1R1; IL6 |
| PTEN Signaling | ITGAM; ITGA5; RAC1; PTEN; PRKCZ; BCL2L11; |
| | MAPK1; RAC2; AKT2; EGFR; IKBKB; CBL; PIK3CA; |
| | CDKN1B; PTK2; NFKB2; BCL2; PIK3CB; BCL2L1; |
| | MAPK3; ITGA1; KRAS; ITGB7; ILK; PDGFRB; INSR; |
| | RAF1; IKBKG; CASP9; CDKN1A; ITGB1; MAP2K2; |
| | AKT1; PIK3R1; CHUK; PDGFRA; PDPK1; MAP2K1; |
| | NFKB1; ITGB3; CDC42; CCND1; GSK3A; ITGA2; |
| | GSK3B; AKT3; FOXO1; CASP3; RPS6KB1 |
| p53 Signaling | PTEN; EP300; BBC3; PCAF; FASN; BRCA1; GADD45A; |
| Aryl Hydrocarbon | BIRC5; AKT2; PIK3CA; CHEK1; TP53INP1; BCL2; |
| Receptor | PIK3CB; PIK3C3; MAPK8; THBS1; ATR; BCL2L1; E2F1; |
| Signaling | PMAIP1; CHEK2; TNFRSF10B; TP73; RB1; HDAC9; |
| | CDK2; PIK3C2A; MAPK14; TP53; LRDD; CDKN1A; |
| | HIPK2; AKT1; PIK3R1; RRM2B; APAF1; CTNNB1; |
| | SIRT1; CCND1; PRKDC; ATM; SFN; CDKN2A; JUN; |
| | SNAI2; GSK3B; BAX; AKT3 |
| | HSPB1; EP300; FASN; TGM2; RXRA; MAPK1; NQO1; |
| | NCOR2; SP1; ARNT; CDKN1B; FOS; CHEK1; |
| | SMARCA4; NFKB2; MAPK8; ALDH1A1; ATR; E2F1; |
| | MAPK3; NRIP1; CHEK2; RELA; TP73; GSTP1; RB1; |
| | SRC; CDK2; AHR; NFE2L2; NCOA3; TP53; TNF; |
| | CDKN1A; NCOA2; APAF1; NFKB1; CCND1; ATM; ESR1; |
| | CDKN2A; MYC; JUN; ESR2; BAX; IL6; CYP1B1; |
| | HSP90AA1 |
| Xenobiotic Metabolism | PRKCE; EP300; PRKCZ; RXRA; MAPK1; NQO1; |
| Signaling | NCOR2; PIK3CA; ARNT; PRKCI; NFKB2; CAMK2A; |
| | PIK3CB; PPP2R1A; PIK3C3; MAPK8; PRKD1; |
| | ALDH1A1; MAPK3; NRIP1; KRAS; MAPK13; PRKCD; |
| | GSTP1; MAPK9; NOS2A; ABCB1; AHR; PPP2CA; FTL; |
| | NFE2L2; PIK3C2A; PPARGC1A; MAPK14; TNF; RAF1; |
| | CREBBP; MAP2K2; PIK3R1; PPP2R5C; MAP2K1; |
| | NFKB1; KEAP1; PRKCA; EIF2AK3; IL6; CYP1B1; |
| | HSP90AA1 |
| SAPK/JNK Signaling | PRKCE; IRAK1; PRKAA2; EIF2AK2; RAC1; ELK1; |
| | GRK6; MAPK1; GADD45A; RAC2; PLK1; AKT2; PIK3CA; |
| | FADD; CDK8; PIK3CB; PIK3C3; MAPK8; RIPK1; |
| | GNB2L1; IRS1; MAPK3; MAPK10; DAXX; KRAS; |
| | PRKCD; PRKAA1; MAPK9; CDK2; PIM1; PIK3C2A; |
| | TRAF2; TP53; LCK; MAP3K7; DYRK1A; MAP2K2; |
| | PIK3R1; MAP2K1; PAK3; CDC42; JUN; TTK; CSNK1A1; |
| | CRKL; BRAF; SGK |
| PPAr/RXR Signaling | PRKAA2; EP300; INS; SMAD2; TRAF6; PPARA; FASN; |
| | RXRA; MAPK1; SMAD3; GNAS; IKBKB; NCOR2; |
| | ABCA1; GNAQ; NFKB2; MAP3K14; STAT5B; MAPK8; |
| | IRS1; MAPK3; KRAS; RELA; PRKAA1; PPARGC1A; |
| | NCOA3; MAPK14; INSR; RAF1; IKBKG; RELB; MAP3K7; |
| | CREBBP; MAP2K2; JAK2; CHUK; MAP2K1; NFKB1; |
| | TGFBR1; SMAD4; JUN; IL1R1; PRKCA; IL6; HSP90AA1; |
| | ADIPOQ |
| NF-KB Signaling | IRAK1; EIF2AK2; EP300; INS; MYD88; PRKCZ; TRAF6; |
| | TBK1; AKT2; EGFR; IKBKB; PIK3CA; BTRC; NFKB2; |
| | MAP3K14; PIK3CB; PIK3C3; MAPK8; RIPK1; HDAC2; |
| | KRAS; RELA; PIK3C2A; TRAF2; TLR4; PDGFRB; TNF; |
| | INSR; LCK; IKBKG; RELB; MAP3K7; CREBBP; AKT1; |
| | PIK3R1; CHUK; PDGFRA; NFKB1; TLR2; BCL10; |
| | GSK3B; AKT3; TNFAIP3; IL1R1 |
| Neuregulin Signaling | ERBB4; PRKCE; ITGAM; ITGA5; PTEN; PRKCZ; ELK1; |
| Wnt & Beta catenin | MAPK1; PTPN11; AKT2; EGFR; ERBB2; PRKCI; |
| Signaling | CDKN1B; STAT5B; PRKD1; MAPK3; ITGA1; KRAS; |
| | PRKCD; STAT5A; SRC; ITGB7; RAF1; ITGB1; MAP2K2; |
| | ADAM17; AKT1; PIK3R1; PDPK1; MAP2K1; ITGB3; |
| | EREG; FRAP1; PSEN1; ITGA2; MYC; NRG1; CRKL; |
| | AKT3; PRKCA; HSP90AA1; RPS6KB1 |
| | CD44; EP300; LRP6; DVL3; CSNK1E; GJA1; SMO; |
| | AKT2; PIN1; CDH1; BTRC; GNAQ; MARK2; PPP2R1A; |
| | WNT11; SRC; DKK1; PPP2CA; SOX6; SFRP2; ILK; |
| | LEF1; SOX9; TP53; MAP3K7; CREBBP; TCF7L2; AKT1; |
| | PPP2R5C; WNT5A; LRP5; CTNNB1; TGFBR1; CCND1; |
| | GSK3A; DVL1; APC; CDKN2A; MYC; CSNK1A1; GSK3B; |
| | AKT3; SOX2 |
| Insulin Receptor | PTEN; INS; EIF4E; PTPN1; PRKCZ; MAPK1; TSC1; |
| Signaling | PTPN11; AKT2; CBL; PIK3CA; PRKCI; PIK3CB; PIK3C3; |
| | MAPK8; IRS1; MAPK3; TSC2; KRAS; EIF4EBP1; |
| | SLC2A4; PIK3C2A; PPP1CC; INSR; RAF1; FYN; |
| | MAP2K2; JAK1; AKT1; JAK2; PIK3R1; PDPK1; MAP2K1; |
| | GSK3A; FRAP1; CRKL; GSK3B; AKT3; FOXO1; SGK; |
| | RPS6KB1 |
| IL-6 Signaling | HSPB1; TRAF6; MAPKAPK2; ELK1; MAPK1; PTPN11; |
| | IKBKB; FOS; NFKB2; MAP3K14; MAPK8; MAPK3; |
| | MAPK10; IL6ST; KRAS; MAPK13; IL6R; RELA; SOCS1; |
| | MAPK9; ABCB1; TRAF2; MAPK14; TNF; RAF1; IKBKG; |
| | RELB; MAP3K7; MAP2K2; IL8; JAK2; CHUK; STAT3; |
| | MAP2K1; NFKB1; CEBPB; JUN; IL1R1; SRF; IL6 |
| Hepatic Cholestasis | PRKCE; IRAK1; INS; MYD88; PRKCZ; TRAF6; PPARA; |
| | RXRA; IKBKB; PRKCI; NFKB2; MAP3K14; MAPK8; |
| | PRKD1; MAPK10; RELA; PRKCD; MAPK9; ABCB1; |
| | TRAF2; TLR4; TNF; INSR; IKBKG; RELB; MAP3K7; IL8; |
| | CHUK; NR1H2; TJP2; NFKB1; ESR1; SREBF1; FGFR4; |
| | JUN; IL1R1; PRKCA; IL6 |
| IGF-1 Signaling | IGF1; PRKCZ; ELK1; MAPK1; PTPN11; NEDD4; AKT2; |
| | PIK3CA; PRKCI; PTK2; FOS; PIK3CB; PIK3C3; MAPK8; |
| | IGF1R; IRS1; MAPK3; IGFBP7; KRAS; PIK3C2A; |
| | YWHAZ; PXN; RAF1; CASP9; MAP2K2; AKT1; PIK3R1; |
| | PDPK1; MAP2K1; IGFBP2; SFN; JUN; CYR61; AKT3; |
| | FOXO1; SRF; CTGF; RPS6KB1 |
| NRF2-mediated | PRKCE; EP300; SOD2; PRKCZ; MAPK1; SQSTM1; |
| Oxidative | NQO1; PIK3CA; PRKCI; FOS; PIK3CB; PIK3C3; MAPK8; |
| Stress Response | PRKD1; MAPK3; KRAS; PRKCD; GSTP1; MAPK9; FTL; |
| | NFE2L2; PIK3C2A; MAPK14; RAF1; MAP3K7; CREBBP; |
| | MAP2K2; AKT1; PIK3R1; MAP2K1; PPIB; JUN; KEAP1; |
| | GSK3B; ATF4; PRKCA; EIF2AK3; HSP90AA1 |
| Hepatic | EDN1; IGF1; KDR; FLT1; SMAD2; FGFR1; MET; PGF; |
| Fibrosis/Hepatic | SMAD3; EGFR; FAS; CSF1; NFKB2; BCL2; MYH9; |
| Stellate Cell Activation | IGF1R; IL6R; RELA; TLR4; PDGFRB; TNF; RELB; IL8; |
| | PDGFRA; NFKB1; TGFBR1; SMAD4; VEGFA; BAX; |
| | IL1R1; CCL2; HGF; MMP1; STAT1; IL6; CTGF; MMP9 |
| PPAR Signaling | EP300; INS; TRAF6; PPARA; RXRA; MAPK1; IKBKB; |
| | NCOR2; FOS; NFKB2; MAP3K14; STAT5B; MAPK3; |
| | NRIP1; KRAS; PPARG; RELA; STAT5A; TRAF2; |
| | PPARGC1A; PDGFRB; TNF; INSR; RAF1; IKBKG; |
| | RELB; MAP3K7; CREBBP; MAP2K2; CHUK; PDGFRA; |
| | MAP2K1; NFKB1; JUN; IL1R1; HSP90AA1 |
| Fc Epsilon RI Signaling | PRKCE; RAC1; PRKCZ; LYN; MAPK1; RAC2; PTPN11; |
| | AKT2; PIK3CA; SYK; PRKCI; PIK3CB; PIK3C3; MAPK8; |
| | PRKD1; MAPK3; MAPK10; KRAS; MAPK13; PRKCD; |
| | MAPK9; PIK3C2A; BTK; MAPK14; TNF; RAF1; FYN; |
| | MAP2K2; AKT1; PIK3R1; PDPK1; MAP2K1; AKT3; |
| | VAV3; PRKCA |
| G-Protein Coupled | PRKCE; RAP1A; RGS16; MAPK1; GNAS; AKT2; IKBKB; |
| Receptor Signaling | PIK3CA; CREB1; GNAQ; NFKB2; CAMK2A; PIK3CB; |
| | PIK3C3; MAPK3; KRAS; RELA; SRC; PIK3C2A; RAF1; |
| | IKBKG; RELB; FYN; MAP2K2; AKT1; PIK3R1; CHUK; |
| | PDPK1; STAT3; MAP2K1; NFKB1; BRAF; ATF4; AKT3; |
| | PRKCA |
| Inositol Phosphate | PRKCE; IRAK1; PRKAA2; EIF2AK2; PTEN; GRK6; |
| Metabolism | MAPK1; PLK1; AKT2; PIK3CA; CDK8; PIK3CB; PIK3C3; |
| | MAPK8; MAPK3; PRKCD; PRKAA1; MAPK9; CDK2; |
| | PIM1; PIK3C2A; DYRK1A; MAP2K2; PIP5K1A; PIK3R1; |
| | MAP2K1; PAK3; ATM; TTK; CSNK1A1; BRAF; SGK |
| PDGF Signaling | EIF2AK2; ELK1; ABL2; MAPK1; PIK3CA; FOS; PIK3CB; |
| | PIK3C3; MAPK8; CAV1; ABL1; MAPK3; KRAS; SRC; |
| | PIK3C2A; PDGFRB; RAF1; MAP2K2; JAK1; JAK2; |
| | PIK3R1; PDGFRA; STAT3; SPHK1; MAP2K1; MYC; |
| | JUN; CRKL; PRKCA; SRF; STAT1; SPHK2 |
| VEGF Signaling | ACTN4; ROCK1; KDR; FLT1; ROCK2; MAPK1; PGF; |
| | AKT2; PIK3CA; ARNT; PTK2; BCL2; PIK3CB; PIK3C3; |
| | BCL2L1; MAPK3; KRAS; HIF1A; NOS3; PIK3C2A; PXN; |
| | RAF1; MAP2K2; ELAVL1; AKT1; PIK3R1; MAP2K1; SFN; |
| | VEGFA; AKT3; FOXO1; PRKCA |
| Natural Killer Cell | PRKCE; RAC1; PRKCZ; MAPK1; RAC2; PTPN11; |
| Signaling | KIR2DL3; AKT2; PIK3CA; SYK; PRKCI; PIK3CB; |
| | PIK3C3; PRKD1; MAPK3; KRAS; PRKCD; PTPN6; |
| | PIK3C2A; LCK; RAF1; FYN; MAP2K2; PAK4; AKT1; |
| | PIK3R1; MAP2K1; PAK3; AKT3; VAV3; PRKCA |
| Cell Cycle: G1/S | HDAC4; SMAD3; SUV39H1; HDAC5; CDKN1B; BTRC; |
| Checkpoint Regulation | ATR; ABL1; E2F1; HDAC2; HDAC7A; RB1; HDAC11; |
| | HDAC9; CDK2; E2F2; HDAC3; TP53; CDKN1A; CCND1; |
| | E2F4; ATM; RBL2; SMAD4; CDKN2A; MYC; NRG1; |
| | GSK3B; RBL1; HDAC6 |
| T Cell Receptor | RAC1; ELK1; MAPK1; IKBKB; CBL; PIK3CA; FOS; |
| Signaling | NFKB2; PIK3CB; PIK3C3; MAPK8; MAPK3; KRAS; |
| | RELA; PIK3C2A; BTK; LCK; RAF1; IKBKG; RELB; FYN; |
| | MAP2K2; PIK3R1; CHUK; MAP2K1; NFKB1; ITK; BCL10; |
| | JUN; VAV3 |
| Death Receptor | CRADD; HSPB1; BID; BIRC4; TBK1; IKBKB; FADD; |
| Signaling | FAS; NFKB2; BCL2; MAP3K14; MAPK8; RIPK1; CASP8; |
| | DAXX; TNFRSF10B; RELA; TRAF2; TNF; IKBKG; RELB; |
| | CASP9; CHUK; APAF1; NFKB1; CASP2; BIRC2; CASP3; |
| | BIRC3 |
| FGF Signaling | RAC1; FGFR1; MET; MAPKAPK2; MAPK1; PTPN11; |
| | AKT2; PIK3CA; CREB1; PIK3CB; PIK3C3; MAPK8; |
| | MAPK3; MAPK13; PTPN6; PIK3C2A; MAPK14; RAF1; |
| | AKT1; PIK3R1; STAT3; MAP2K1; FGFR4; CRKL; ATF4; |
| | AKT3; PRKCA; HGF |
| GM-CSF Signaling | LYN; ELK1; MAPK1; PTPN11; AKT2; PIK3CA; CAMK2A; |
| | STAT5B; PIK3CB; PIK3C3; GNB2L1; BCL2L1; MAPK3; |
| | ETS1; KRAS; RUNX1; PIM1; PIK3C2A; RAF1; MAP2K2; |
| | AKT1; JAK2; PIK3R1; STAT3; MAP2K1; CCND1; AKT3; |
| | STAT1 |
| Amyotrophic Lateral | BID; IGF1; RAC1; BIRC4; PGF; CAPNS1; CAPN2; |
| Sclerosis Signaling | PIK3CA; BCL2; PIK3CB; PIK3C3; BCL2L1; CAPN1; |
| | PIK3C2A; TP53; CASP9; PIK3R1; RAB5A; CASP1; |
| | APAF1; VEGFA; BIRC2; BAX; AKT3; CASP3; BIRC3 |
| JAK/Stat Signaling | PTPN1; MAPK1; PTPN11; AKT2; PIK3CA; STAT5B; |
| | PIK3CB; PIK3C3; MAPK3; KRAS; SOCS1; STAT5A; |
| | PTPN6; PIK3C2A; RAF1; CDKN1A; MAP2K2; JAK1; |
| | AKT1; JAK2; PIK3R1; STAT3; MAP2K1; FRAP1; AKT3; |
| | STAT1 |
| Nicotinate and | PRKCE; IRAK1; PRKAA2; EIF2AK2; GRK6; MAPK1; |
| Nicotinamide | PLK1; AKT2; CDK8; MAPK8; MAPK3; PRKCD; PRKAA1; |
| Metabolism | PBEF1; MAPK9; CDK2; PIM1; DYRK1A; MAP2K2; |
| | MAP2K1; PAK3; NT5E; TTK; CSNK1A1; BRAF; SGK |
| Chemokine Signaling | CXCR4; ROCK2; MAPK1; PTK2; FOS; CFL1; GNAQ; |
| | CAMK2A; CXCL12; MAPK8; MAPK3; KRAS; MAPK13; |
| | RHOA; CCR3; SRC; PPP1CC; MAPK14; NOX1; RAF1; |
| | MAP2K2; MAP2K1; JUN; CCL2; PRKCA |
| IL-2 Signaling | ELK1; MAPK1; PTPN11; AKT2; PIK3CA; SYK; FOS; |
| | STAT5B; PIK3CB; PIK3C3; MAPK8; MAPK3; KRAS; |
| | SOCS1; STAT5A; PIK3C2A; LCK; RAF1; MAP2K2; |
| | JAK1; AKT1; PIK3R1; MAP2K1; JUN; AKT3 |
| Synaptic Long Term | PRKCE; IGF1; PRKCZ; PRDX6; LYN; MAPK1; GNAS; |
| Depression | PRKCI; GNAQ; PPP2R1A; IGF1R; PRKD1; MAPK3; |
| | KRAS; GRN; PRKCD; NOS3; NOS2A; PPP2CA; |
| | YWHAZ; RAF1; MAP2K2; PPP2R5C; MAP2K1; PRKCA |
| Estrogen Receptor | TAF4B; EP300; CARM1; PCAF; MAPK1; NCOR2; |
| Signaling | SMARCA4; MAPK3; NRIP1; KRAS; SRC; NR3C1; |
| | HDAC3; PPARGC1A; RBM9; NCOA3; RAF1; CREBBP; |
| | MAP2K2; NCOA2; MAP2K1; PRKDC; ESR1; ESR2 |
| Protein Ubiquitination | TRAF6; SMURF1; BIRC4; BRCA1; UCHL1; NEDD4; |
| Pathway | CBL; UBE2I; BTRC; HSPA5; USP7; USP10; FBXW7; |
| | USP9X; STUB1; USP22; B2M; BIRC2; PARK2; USP8; |
| | USP1; VHL; HSP90AA1; BIRC3 |
| IL-10 Signaling | TRAF6; CCR1; ELK1; IKBKB; SP1; FOS; NFKB2; |
| | MAP3K14; MAPK8; MAPK13; RELA; MAPK14; TNF; |
| | IKBKG; RELB; MAP3K7; JAK1; CHUK; STAT3; NFKB1; |
| | JUN; IL1R1; IL6 |
| VDR/RXR Activation | PRKCE; EP300; PRKCZ; RXRA; GADD45A; HES1; |
| | NCOR2; SP1; PRKCI; CDKN1B; PRKD1; PRKCD; |
| | RUNX2; KLF4; YY1; NCOA3; CDKN1A; NCOA2; SPP1; |
| | LRP5; CEBPB; FOXO1; PRKCA |
| TGF-beta Signaling | EP300; SMAD2; SMURF1; MAPK1; SMAD3; SMAD1; |
| | FOS; MAPK8; MAPK3; KRAS; MAPK9; RUNX2; |
| | SERPINE1; RAF1; MAP3K7; CREBBP; MAP2K2; |
| | MAP2K1; TGFBR1; SMAD4; JUN; SMAD5 |
| Toll-like Receptor | IRAK1; EIF2AK2; MYD88; TRAF6; PPARA; ELK1; |
| Signaling | IKBKB; FOS; NFKB2; MAP3K14; MAPK8; MAPK13; |
| | RELA; TLR4; MAPK14; IKBKG; RELB; MAP3K7; CHUK; |
| | NFKB1; TLR2; JUN |
| p38 MAPK Signaling | HSPB1; IRAK1; TRAF6; MAPKAPK2; ELK1; FADD; FAS; |
| | CREB1; DDIT3; RPS6KA4; DAXX; MAPK13; TRAF2; |
| | MAPK14; TNF; MAP3K7; TGFBR1; MYC; ATF4; IL1R1; |
| | SRF; STAT1 |
| Neurotrophin/TRK | NTRK2; MAPK1; PTPN11; PIK3CA; CREB1; FOS; |
| Signaling | PIK3CB; PIK3C3; MAPK8; MAPK3; KRAS; PIK3C2A; |
| | RAF1; MAP2K2; AKT1; PIK3R1; PDPK1; MAP2K1; |
| | CDC42; JUN; ATF4 |
| FXR/RXR Activation | INS; PPARA; FASN; RXRA; AKT2; SDC1; MAPK8; |
| | APOB; MAPK10; PPARG; MTTP; MAPK9; PPARGC1A; |
| | TNF; CREBBP; AKT1; SREBF1; FGFR4; AKT3; FOXO1 |
| Synaptic Long Term | PRKCE; RAP1A; EP300; PRKCZ; MAPK1; CREB1; |
| Potentiation | PRKCI; GNAQ; CAMK2A; PRKD1; MAPK3; KRAS; |
| | PRKCD; PPP1CC; RAF1; CREBBP; MAP2K2; MAP2K1; |
| | ATF4; PRKCA |
| Calcium Signaling | RAP1A; EP300; HDAC4; MAPK1; HDAC5; CREB1; |
| | CAMK2A; MYH9; MAPK3; HDAC2; HDAC7A; HDAC11; |
| | HDAC9; HDAC3; CREBBP; CALR; CAMKK2; ATF4; |
| | HDAC6 |
| EGF Signaling | ELK1; MAPK1; EGFR; PIK3CA; FOS; PIK3CB; PIK3C3; |
| | MAPK8; MAPK3; PIK3C2A; RAF1; JAK1; PIK3R1; |
| | STAT3; MAP2K1; JUN; PRKCA; SRF; STAT1 |
| Hypoxia Signaling in | EDN1; PTEN; EP300; NQO1; UBE2I; CREB1; ARNT; |
| the | HIF1A; SLC2A4; NOS3; TP53; LDHA; AKT1; ATM; |
| Cardiovascular System | VEGFA; JUN; ATF4; VHL; HSP90AA1 |
| LPS/IL-1 Mediated | IRAK1; MYD88; TRAF6; PPARA; RXRA; ABCA1; |
| Inhibition | MAPK8; ALDH1A1; GSTP1; MAPK9; ABCB1; TRAF2; |
| of RXR Function | TLR4; TNF; MAP3K7; NR1H2; SREBF1; JUN; IL1R1 |
| LXR/RXR Activation | FASN; RXRA; NCOR2; ABCA1; NFKB2; IRF3; RELA; |
| | NOS2A; TLR4; TNF; RELB; LDLR; NR1H2; NFKB1; |
| | SREBF1; IL1R1; CCL2; IL6; MMP9 |
| Amyloid Processing | PRKCE; CSNK1E; MAPK1; CAPNS1; AKT2; CAPN2; |
| | CAPN1; MAPK3; MAPK13; MAPT; MAPK14; AKT1; |
| | PSEN1; CSNK1A1; GSK3B; AKT3; APP |
| IL-4 Signaling | AKT2; PIK3CA; PIK3CB; PIK3C3; IRS1; KRAS; SOCS1; |
| | PTPN6; NR3C1; PIK3C2A; JAK1; AKT1; JAK2; PIK3R1; |
| | FRAP1; AKT3; RPS6KB1 |
| Cell Cycle: G2/M DNA | EP300; PCAF; BRCA1; GADD45A; PLK1; BTRC; |
| Damage Checkpoint | CHEK1; ATR; CHEK2; YWHAZ; TP53; CDKN1A; |
| Regulation | PRKDC; ATM; SFN; CDKN2A |
| Nitric Oxide Signaling | KDR; FLT1; PGF; AKT2; PIK3CA; PIK3CB; PIK3C3; |
| in the | CAV1; PRKCD; NOS3; PIK3C2A; AKT1; PIK3R1; |
| Cardiovascular System | VEGFA; AKT3; HSP90AA1 |
| Purine Metabolism | NME2; SMARCA4; MYH9; RRM2; ADAR; EIF2AK4; |
| | PKM2; ENTPD1; RAD51; RRM2B; TJP2; RAD51C; |
| | NT5E; POLD1; NME1 |
| cAMP-mediated | RAP1A; MAPK1; GNAS; CREB1; CAMK2A; MAPK3; |
| Signaling | SRC; RAF1; MAP2K2; STAT3; MAP2K1; BRAF; ATF4 |
| Mitochondrial | SOD2; MAPK8; CASP8; MAPK10; MAPK9; CASP9; |
| Dysfunction | PARK7; PSEN1; PARK2; APP; CASP3 |
| Notch Signaling | HES1; JAG1; NUMB; NOTCH4; ADAM17; NOTCH2; |
| | PSEN1; NOTCH3; NOTCH1; DLL4 |
| Endoplasmic Reticulum | HSPA5; MAPK8; XBP1; TRAF2; ATF6; CASP9; ATF4; |
| Stress Pathway | EIF2AK3; CASP3 |
| Pyrimidine Metabolism | NME2; AICDA; RRM2; EIF2AK4; ENTPD1; RRM2B; |
| | NT5E; POLD1; NME1 |
| Parkinson's Signaling | UCHL1; MAPK8; MAPK13; MAPK14; CASP9; PARK7; |
| | PARK2; CASP3 |
| Cardiac & Beta | GNAS; GNAQ; PPP2R1A; GNB2L1; PPP2CA; PPP1CC; |
| Adrenergic | PPP2R5C |
| Signaling | |
| Glycolysis/Gluconeoge | HK2; GCK; GPI; ALDH1A1; PKM2; LDHA; HK1 |
| nesis | |
| Interferon Signaling | IRF1; SOCS1; JAK1; JAK2; IFITM1; STAT1; IFIT3 |
| Sonic Hedgehog | ARRB2; SMO; GLI2; DYRK1A; GLI1; GSK3B; DYRK1B |
| Signaling | |
| Glycerophospholipid | PLD1; GRN; GPAM; YWHAZ; SPHK1; SPHK2 |
| Metabolism | |
| Phospholipid | PRDX6; PLD1; GRN; YWHAZ; SPHK1; SPHK2 |
| Degradation | |
| Tryptophan | SIAH2; PRMT5; NEDD4; ALDH1A1; CYP1B1; SIAH1 |
| Metabolism | |
| Lysine Degradation | SUV39H1; EHMT2; NSD1; SETD7; PPP2R5C |
| Nucleotide Excision | ERCC5; ERCC4; XPA; XPC; ERCC1 |
| Repair | |
| Pathway | |
| Starch and Sucrose | UCHL1; HK2; GCK; GPI; HK1 |
| Metabolism | |
| Amino sugars | NQO1; HK2; GCK; HK1 |
| Metabolism | |
| Arachidonic Acid | PRDX6; GRN; YWHAZ; CYP1B1 |
| Metabolism | |
| Circadian Rhythm | CSNK1E; CREB1; ATF4; NR1D1 |
| Signaling | |
| Coagulation System | BDKRB1; F2R; SERPINE1; F3 |
| Dopamine Receptor | PPP2R1A; PPP2CA; PPP1CC; PPP2R5C |
| Signaling | |
| Glutathione | IDH2; GSTP1; ANPEP; IDH1 |
| Metabolism | |
| Glycerolipid | ALDH1A1; GPAM; SPHK1; SPHK2 |
| Metabolism | |
| Linoleic Acid | PRDX6; GRN; YWHAZ; CYP1B1 |
| Metabolism | |
| Methionine Metabolism | DNMT1; DNMT3B; AHCY; DNMT3A |
| Pyruvate Metabolism | GLO1; ALDH1A1; PKM2; LDHA |
| Arginine and Proline | ALDH1A1; NOS3; NOS2A |
| Metabolism | |
| Eicosanoid Signaling | PRDX6; GRN; YWHAZ |
| Fructose and Mannose | HK2; GCK; HK1 |
| Metabolism | |
| Galactose Metabolism | HK2; GCK; HK1 |
| Stilbene, Coumarine | PRDX6; PRDX1; TYR |
| and | |
| Lignin Biosynthesis | |
| Antigen Presentation | CALR; B2M |
| Pathway | |
| Biosynthesis of | NQO1; DHCR7 |
| Steroids | |
| Butanoate Metabolism | ALDH1A1; NLGN1 |
| Citrate Cycle | IDH2; IDH1 |
| Fatty Acid Metabolism | ALDH1A1; CYP1B1 |
| Glycerophospholipid | PRDX6; CHKA |
| Metabolism | |
| Histidine Metabolism | PRMT5; ALDH1A1 |
| Inositol Metabolism | ERO1L; APEX1 |
| Metabolism of | GSTP1; CYP1B1 |
| Xenobiotics | |
| by Cytochrome p450 | |
| Methane Metabolism | PRDX6; PRDX1 |
| Phenylalanine | PRDX6; PRDX1 |
| Metabolism | |
| Propanoate Metabolism | ALDH1A1; LDHA |
| Selenoamino Acid | PRMT5; AHCY |
| Metabolism | |
| Sphingolipid | SPHK1; SPHK2 |
| Metabolism | |
| Aminophosphonate | PRMT5 |
| Metabolism | |
| Androgen and Estrogen | PRMT5 |
| Metabolism | |
| Ascorbate and Aldarate | ALDH1A1 |
| Metabolism | |
| Bile Acid Biosynthesis | ALDH1A1 |
| Cysteine Metabolism | LDHA |
| Fatty Acid Biosynthesis | FASN |
| Glutamate Receptor | GNB2L1 |
| Signaling | |
| NRF2-mediated | PRDX1 |
| Oxidative | |
| Stress Response | |
| Pentose Phosphate | GPI |
| Pathway | |
| Pentose and | UCHL1 |
| Glucuronate | |
| Interconversions | |
| Retinol Metabolism | ALDH1A1 |
| Riboflavin Metabolism | TYR |
| Tyrosine Metabolism | PRMT5, TYR |
| Ubiquinone | PRMT5 |
| Biosynthesis | |
| Valine, Leucine and | ALDH1A1 |
| Isoleucine Degradation | |
| Glycine, Serine and | CHKA |
| Threonine Metabolism | |
| Lysine Degradation | ALDH1A1 |
| Pain/Taste | TRPM5; TRPA1 |
| Pain | TRPM7; TRPC5; TRPC6; TRPC1; Cnr1; cnr2; Grk2; |
| | Trpa1; Pomc; Cgrp; Crf; Pka; Era; Nr2b; TRPM5; Prkaca; |
| | Prkacb; Prkar1a; Prkar2a |
| Mitochondrial Function | AIF; CytC; SMAC (Diablo); Aifm-1; Aifm-2 |
| Developmental | BMP-4; Chordin (Chrd); Noggin (Nog); WNT (Wnt2; |
| Neurology | Wnt2b; Wnt3a; Wnt4; Wnt5a; Wnt6; Wnt7b; Wnt8b; |
| | Wnt9a; Wnt9b; Wnt10a; Wnt10b; Wnt16); beta-catenin; |
| | Dkk-1; Frizzled related proteins; Otx-2; Gbx2; FGF-8; |
| | Reelin; Dab1; unc-86 (Pou4f1 or Brn3a); Numb; Reln |

[0455] Thus, also described herein are methods of inducing one or more mutations in a eukaryotic or prokaryotic cell (in vitro, i.e., in an isolated eukaryotic cell) as herein discussed comprising delivering to a cell a vector as described herein. The mutation(s) can include the introduction, deletion, or substitution of one or more nucleotides at a target sequence of cell(s). In some embodiments, the mutations can include the introduction, deletion, or substitution of 1-75 nucleotides at each target sequence of said cell(s). The mutations can include the introduction, deletion, or substitution of 1, 5, 10, 11, 12, 13, 14, 15, 16, 17, 18, 19, 20, 21, 22, 23, 24, 25, 26, 27, 28, 29, 30, 35, 40, 45, 50, or 75 nucleotides at each target sequence. The mutations can include the introduction, deletion, or substitution of 5, 10, 11, 12, 13, 14, 15, 16, 17, 18, 19, 20, 21, 22, 23, 24, 25, 26, 27, 28, 29, 30, 35, 40, 45, 50, or 75 nucleotides at each target sequence of said cell(s). The mutations include the introduction, deletion, or substitution of 10, 11, 12, 13, 14, 15, 16, 17, 18, 19, 20, 21, 22, 23, 24, 25, 26, 27, 28, 29, 30, 35, 40, 45, 50, or 75 nucleotides at each target sequence of said cell(s). The mutations can include the introduction, deletion, or substitution of 20, 21, 22, 23, 24, 25, 26, 27, 28, 29, 30, 35, 40, 45, 50, or 75 nucleotides at each target sequence of said cell(s). The mutations can include the introduction, deletion, or substitution of 40, 45, 50, 75, 100, 200, 300, 400 or 500 nucleotides at each target sequence of said cell(s). The mutations can include the introduction, deletion, or substitution of 500, 600, 700, 800, 900, 1000, 1100, 1200, 1300, 1400, 1500, 1600, 1700, 1800, 1900, 2000, 2100, 2200, 2300, 2400, 2500, 2600, 2700, 2800, 2900, 3000, 3100, 3200, 3300, 3400, 3500, 3600, 3700, 3800, 3900, 4000, 4100, 4200, 4300, 4400, 4500, 4600, 4700, 4800, 4900, 5000, 5100, 5200, 5300, 5400, 5500, 5600, 5700, 5800, 5900, 6000, 6100, 6200, 6300, 6400, 6500, 6600, 6700, 6800, 6900, 7000, 7100, 7200, 7300, 7400, 7500, 7600, 7700, 7800, 7900, 8000, 8100, 8200, 8300, 8400, 8500, 8600, 8700, 8800, 8900, 9000, 9100, 9200, 9300, 9400, 9500, 9600, 9700, 9800, or 9900 to 10000 nucleotides at each target sequence of said cell(s).

[0456] In some embodiments, the modifications can include the introduction, deletion, or substitution of nucleotides at each target sequence of said cell(s) via nucleic acid components (e.g., guide(s) RNA(s) or sgRNA(s)), such as those mediated by a CRISPR-Cas system.

[0457] In some embodiments, the modifications can include the introduction, deletion, or substitution of nucleotides at a target or random sequence of said cell(s) via a non CRISPR-Cas system or technique. Such techniques are discussed elsewhere herein, such as where engineered cells and methods of generating the engineered cells and organisms are discussed.

[0458] For minimization of toxicity and off-target effect when using a CRISPR-Cas system, it may be important to control the concentration of Cas mRNA and guide RNA delivered. Optimal concentrations of Cas mRNA and guide RNA can be determined by testing different concentrations in a cellular or non-human eukaryote animal model and using deep sequencing to analyze the extent of modification at potential off-target genomic loci. Alternatively, to minimize the level of toxicity and off-target effect, Cas nickase mRNA (for example S. pyogenes Cas9-like with the D10A mutation) can be delivered with a pair of guide RNAs targeting a site of interest. Guide sequences and strategies to minimize toxicity and off-target effects can be as in International Patent Application Publication WO 2014/093622 (PCT/US2013/074667); or, via mutation as herein.

[0459] Typically, in the context of an endogenous CRISPR system, formation of a CRISPR complex (comprising a guide sequence hybridized to a target sequence and complexed with one or more Cas proteins) results in cleavage of one or both strands in or near (e.g., within 1, 2, 3, 4, 5, 6, 7, 8, 9, 10, 20, 50, or more base pairs from) the target sequence. Without wishing to be bound by theory, a tracr sequence, which may comprise or consist of all or a portion of a wild-type tracr sequence (e.g., about or more than about 20, 26, 32, 45, 48, 54, 63, 67, 85, or more nucleotides of a wild-type tracr sequence), may also form part of a CRISPR complex, such as by hybridization along at least a portion of the tracr sequence to all or a portion of a tracr mate sequence that is operably linked to a guide sequence.

[0460] In one embodiment, the invention provides a method of modifying a target polynucleotide in a eukaryotic cell. In some embodiments, the method includes delivering an engineered cell described herein and/or an engineered AAV capsid particle described herein having a CRISPR-Cas molecule as a cargo molecule to a subject and/or cell. The CRISPR-Cas system molecule(s) delivered can complex to bind to the target polynucleotide, e.g., to effect cleavage of said target polynucleotide, thereby modifying the target polynucleotide, wherein the CRISPR complex comprises a CRISPR enzyme complexed with a guide sequence hybridized to a target sequence within said target polynucleotide, wherein said guide sequence can be linked to a tracr mate sequence which in turn hybridizes to a tracr sequence. In some embodiments, said cleavage comprises cleaving one or two strands at the location of the target sequence by said CRISPR enzyme. In some embodiments, said cleavage results in decreased transcription of a target gene. In some embodiments, the method further comprises repairing said cleaved target polynucleotide by homologous recombination with an exogenous template polynucleotide, wherein said repair results in a mutation comprising an insertion, deletion, or substitution of one or more nucleotides of said target polynucleotide. In some embodiments, said mutation results in one or more amino acid changes in a protein expressed from a gene comprising the target sequence. In some embodiments, the method further comprises delivering one or more vectors to said eukaryotic cell, wherein one or more vectors comprise the CRISPR enzyme and one or more vectors drive expression of one or more of: the guide sequence linked to the tracr mate sequence, and the tracr sequence. In some embodiments, said CRISPR enzyme drive expression of one or more of: the guide sequence linked to the tracr mate sequence, and the tracr sequence. In some embodiments such CRISPR enzyme are delivered to the eukaryotic cell in a subject. In some embodiments, said modifying takes place in said eukaryotic cell in a cell culture. In some embodiments, the method further comprises isolating said eukaryotic cell from a subject prior to said modifying. In some embodiments, the method further comprises returning said eukaryotic cell and/or cells derived therefrom to said subject. In some embodiments, the isolated cells can be returned to the subject after delivery of one or more engineered AAV capsid particles to the isolated cell. In some embodiments, the isolated cells can be returned to the subject after delivering one or more molecules of the engineered delivery system described herein to the isolated cell, thus making the isolated cells engineered cells as previously described.

### Screening and Cell Selection

[0461] The engineered AAV capsid system vectors, engineered cells, and/or engineered AAV capsid particles described herein can be used in a screening assay and/or cell selection assay. The engineered delivery system vectors, engineered cells, and/or engineered AAV capsid particles can be delivered to a subject and/or cell. In some embodiments, the cell is a eukaryotic cell. The cell can be in vitro, ex vivo, in situ, or in vivo. The engineered AAV capsid system molecules, vectors, engineered cells, and/or engineered AAV capsid particles described herein can introduce an exogenous molecule or compound to a subject or cell to which they are delivered. The presence of an exogenous molecule or compound can be detected which can allow for identification of a cell and/or attribute thereof. In some embodiments, the delivered molecules or particles can impart a gene or other nucleotide modification (e.g., mutations, gene or polynucleotide insertion and/or deletion, etc.). In some embodiments the nucleotide modification can be detected in a cell by sequencing. In some embodiments, the nucleotide modification can result in a physiological and/or biological modification to the cell that results in a detectable phenotypic change in the cell, which can allow for detection, identification, and/or selection of the cell. In some embodiments, the phenotypic change can be cell death, such as embodiments where binding of a CRISPR complex to a target polynucleotide results in cell death. Embodiments of the invention allow for selection of specific cells without requiring a selection marker or a two-step process that may include a counter-selection system. The cell(s) may be prokaryotic or eukaryotic cells.

[0462] In one embodiment, the invention provides for a method of selecting one or more cell(s) by introducing one or more mutations in a gene in the one or more cell (s), the method comprising: introducing one or more vectors, which can include one or more engineered delivery system molecules or vectors described elsewhere herein, into the cell (s), wherein the one or more vectors can include a CRISPR enzyme and/or drive expression of one or more of: a guide sequence linked to a tracr mate sequence, a tracr sequence, and an editing template; or other polynucleotide to be inserted into the cell and/or genome thereof; wherein, for example that which is being expressed is within and expressed in vivo by the CRISPR enzyme and/or the editing template, when included, comprises the one or more mutations that abolish CRISPR enzyme cleavage; allowing homologous recombination of the editing template with the target polynucleotide in the cell(s) to be selected; allowing a CRISPR complex to bind to a target polynucleotide to effect cleavage of the target polynucleotide within said gene, wherein the CRISPR complex comprises the CRISPR enzyme complexed with (1) the guide sequence that is hybridized to the target sequence within the target polynucleotide, and (2) the tracr mate sequence that is hybridized to the tracr sequence, wherein binding of the CRISPR complex to the target polynucleotide induces cell death, thereby allowing one or more cell(s) in which one or more mutations have been introduced to be selected. In a preferred embodiment, the CRISPR enzyme is a Cas protein. In another embodiment of the invention the cell to be selected may be a eukaryotic cell.

[0463] The screening methods involving the engineered AAV capsid system molecules, vectors, engineered cells, and/or engineered AAV capsid particles, including but not limited to those that deliver one more CRISPR-Cas system molecules to a cell, can be used in detection methods such as fluorescence in situ hybridization (FISH). In some embodiments, one or more components of an engineered CRISPR-Cas system that includes a catalytically inactive Cas protein, can be delivered by an engineered AAV capsid system molecule, engineered cell, and/or engineered AAV capsid particle described elsewhere herein to a cell and used in a FISH method. The CRISPR-Cas system can include an inactivated Cas protein (dCas) (e.g., a dCas9), which lacks the ability to produce DNA double-strand breaks may be fused with a marker, such as fluorescent protein, such as the enhanced green fluorescent protein (eEGFP) and co-expressed with small guide RNAs to target pericentric, centric and teleomeric repeats in vivo. The dCas system can be used to visualize both repetitive sequences and individual genes in the human genome. Such new applications of labelled dCas, dCas CRISPR-Cas systems, engineered AAV capsid system molecules, engineered cells, and/or engineered AAV capsid particles can be used in imaging cells and studying the functional nuclear architecture, especially in cases with a small nucleus volume or complex 3-D structures. (Chen B, Gilbert L A, Cimini B A, Schnitzbauer J, Zhang W, Li G W, Park J, Blackburn E H, Weissman J S, Qi L S, Huang B. 2013. Dynamic imaging of genomic loci in living human cells by an optimized CRISPR/Cas system. Cell 155(7):1479-91. doi: 10.1016/j.cell.2013.12.001., the teachings of which can be applied and/or adapted to the CRISPR systems described herein. A similar approach involving a polynucleotide fused to a marker (e.g., a fluorescent marker) can be delivered to a cell via an engineered AAV capsid system molecule, vector, engineered cell, and/or engineered AAV capsid particle described herein and integrated into the genome of the cell and/or otherwise interact with a region of the genome of a cell for FISH analysis.

[0464] Similar approaches for studying other cell organelles and other cell structures can be accomplished by delivering to the cell (e.g., via an engineered delivery AAV capsid molecule, engineered cell, and/or engineered AAV capsid particle described herein) one or more molecules fused to a marker (such as a fluorescent marker), wherein the molecules fused to the marker are capable of targeting one or more cell structures. By analyzing the presence of the markers, one can identify and/or image specific cell structures.

[0465] In some embodiments, the engineered AAV capsid system molecules and/or engineered AAV capsid particles can be used in a screening assay inside or outside of a cell. In some embodiments, the screening assay can include delivering a CRISPR-Cas cargo molecule(s) via an engineered AAV capsid particle.

[0466] Use of the present system in screening is also provided by the present invention, e.g., gain of function screens. Cells which are artificially forced to overexpress a gene are able to down regulate the gene over time (re-establishing equilibrium) e.g., by negative feedback loops. By the time the screen starts the unregulated gene might be reduced again. Other screening assays are discussed elsewhere herein.

[0467] In an embodiment, the invention provides a cell from or of an in vitro method of delivery, wherein the method comprises contacting the delivery system with a cell, optionally a eukaryotic cell, whereby there is delivery into the cell of constituents of the delivery system, and optionally obtaining data or results from the contacting, and transmitting the data or results.

[0468] In an embodiment, the invention provides a cell from or of an in vitro method of delivery, wherein the method comprises contacting the delivery system with a cell, optionally a eukaryotic cell, whereby there is delivery into the cell of constituents of the delivery system, and optionally obtaining data or results from the contacting, and transmitting the data or results; and wherein the cell product is altered compared to the cell not contacted with the delivery system, for example altered from that which would have been wild type of the cell but for the contacting. In an embodiment, the cell product is non-human or animal. In some embodiments, the cell product is human.

[0469] In some embodiments, a host cell is transiently or non-transiently transfected with one or more vectors described herein. In some embodiments, a cell is transfected as it naturally occurs in a subject optionally to be reintroduced therein. In some embodiments, a cell that is transfected is taken from a subject. In some embodiments, the cell obtained from or is derived from cells taken from a subject, such as a cell line. Delivery mechanisms and techniques of the engineered AAV capsid system, engineered AAV capsid particles are described elsewhere herein.

[0470] In some embodiments it is envisaged to introduce the engineered AAV capsid system molecule(s) and/or engineered AAV capsid particle(s) directly to the host cell. For instance, the engineered AAV capsid system molecule(s) can be delivered together with one or more cargo molecules to be packaged into an engineered AAV capsid particle.

[0471] In some embodiments, the invention provides a method of expressing an engineered delivery molecule and cargo molecule to be packaged in an engineered GTA particle in a cell that can include the step of introducing the vector according any of the vector delivery systems disclosed herein.

[0472] The invention is further described in the following examples, which do not limit the scope of the invention described in the claims.

### EXEMPLIFICATION

### Example 1—mRNA Based Detection Methods are More Stringent for Selection of AAV Variants

[0473] FIG. 1 demonstrates the adeno-associated virus (AAV) transduction mechanism, which results in production of mRNA. As is demonstrated in FIG. 1, functional transduction of a cell by an AAV particle can result in the production of an mRNA strand. Non-functional transduction would not produce such a product despite the viral genome being detectable using a DNA-based assay. Thus, mRNA-based detection assays to detect transduction by e.g., an AAV can be more stringent and provide feedback as to the functionality of a virus particle that is able to functionally transduce a cell. FIG. 2 shows a graph that can demonstrate that mRNA-based selection of AAV variants can be more stringent than DNA-based selection. The virus library was expressed under the control of a CMV promoter.

### Example 2—mRNA Based Detection Methods can be Used to Detect AAV Capsid Variants from a Capsid Variant Library

[0474] FIGS. 3A-3B show graphs that can demonstrate a correlation between the virus library and vector genome DNA (FIG. 3A) and mRNA (FIG. 3B) in the liver. FIGS. 4A-4F show graphs that can demonstrate capsid variants expressed at the mRNA level identified in different tissues.

### Example 3—Capsid mRNA Expression can be Driven by Tissue Specific Promoters

[0475] FIGS. 5A-5C show graphs that can demonstrate capsid mRNA expression in different tissues under the control of cell-type specific promoters (as noted on x-axis). CMV was included as an exemplary constitutive promoter. CK8 is a muscle-specific promoter. MHCK7 is a muscle-specific promoter. hSyn is a neuron specific promoter.

### Example 4—Capsid Variant Library Generation, Variant Screening, and Variant Identification

[0476] Generally, an AAV capsid library can be generated by expressing engineered capsid vectors each containing an engineered AAV capsid polynucleotide previously described in an appropriate AAV producer cell line. See e.g., FIG. 8. This can generate an AAV capsid library that can contain one more desired cell-specific engineered AAV capsid variant. FIG. 7 shows a schematic demonstrating embodiments of generating an AAV capsid variant library, particularly insertion of a random n-mer (n=3-15 amino acids) into a wild-type AAV, e.g., AAV9. In this example, random 7-mers were inserted between aa588-589 of variable region VIII of AAV9 viral protein and used to form the viral genome containing vectors with one variant per vector. As shown in FIG. 8, the capsid variant vector library was used to generate AAV particles where each capsid variant encapsulated its coding sequence as the vector genome. FIG. 9 shows vector maps of representative AAV capsid plasmid library vectors (see e.g., FIG. 8) that can be used in an AAV vector system to generate an AAV capsid variant library. The library can be generated with the capsid variant polynucleotide under the control of a tissue specific promoter or constitutive promoter. The library was also made with capsid variant polynucleotide that included a polyadenylation signal.

[0477] As shown in FIG. 6 the AAV capsid library can be administered to various non-human animals for a first round of mRNA-based selection. As shown in FIG. 1, the transduction process by AAVs and related vectors can result in the production of an mRNA molecule that is reflective of the genome of the virus that transduced the cell. As is at least demonstrated in the Examples herein, mRNA based-selection can be more specific and effective to determine a virus particle capable of functionally transducing a cell because it is based on the functional product produced as opposed to just detecting the presence of a virus particle in the cell by measuring the presence of viral DNA.

[0478] After first-round administration, one or more engineered AAV virus particles having a desired capsid variant can then be used to form a filtered AAV capsid library. Desirable AAV virus particles can be identified by measuring the mRNA expression of the capsid variants and determining which variants are highly expressed in the desired cell type(s) as compared to non-desired cells type(s). Those that are highly expressed in the desired cell, tissue, and/or organ type are the desired AAV capsid variant particles. In some embodiments, the AAV capsid variant encoding polynucleotide is under control of a tissue-specific promoter that has selective activity in the desired cell, tissue, or organ.

[0479] The engineered AAV capsid variant particles identified from the first round can then be administered to various non-human animals. In some embodiments, the animals used in the second round of selection and identification are not the same as those animals used for first round selection and identification. Similar to round 1, after administration the top expressing variants in the desired cell, tissue, and/or organ type(s) can be identified by measuring viral mRNA expression in the cells. The top variants identified after round two can then be optionally barcoded and optionally pooled. In some embodiments, top variants from the second round can then be administered to a non-human primate to identify the top cell-specific variant(s), particularly if the end use for the top variant is in humans. Administration at each round can be systemic.

[0480] FIG. 10 shows a graph that can demonstrate the viral titer (calculated as AAV9 vector genome/15 cm dish) produced by libraries generated using different promoters. As demonstrated in FIG. 10, virus titer was not affected significantly be the use of different promoters.

### Example 5—Hematopoietic Cell-Tropic Enhanced hemoAAV Capsids

[0481] Most strategies to date for gene therapy or gene editing in the hematoimmune system rely on first isolating blood cells from a patient, and then modifying them ex vivo before re-infusing them into the patient. However, these methods have a number of limitations including: 1) it can be difficult to harvest sufficient cells from a subject who is already very ill; 2) there are some blood cell types that are only formed early in life (e.g., Bib cells, gamma-delta T cells) or reside in hard to access tissues (e.g., microglia and Langerhans cells), and these cells cannot be effectively recovered or replenished by such isolation and transplant procedures; and 3) it can be challenging to sustain the isolated cells ex vivo in their native state and to re-engraft them safely and effectively. Regarding point 3), for hematopoietic stem cells (and likely other cell types as well), ex vivo modification and re-engraftment may cause a “bottleneck” such that the repopulated blood system exhibits profound oligoclonality, with a selection for more proliferative progenitors that may be pre-disposed to neoplastic transformation. In contrast, the AAV system described herein (e.g., a hematoAAV system) may be used to modify blood stem cells and other mature blood cell populations in situ to circumvent these limitations, thereby enabling research and clinical applications that are not currently possible and increasing the safety of gene therapy and gene editing for hematologic disease and immune support.

[0482] The interaction between AAV capsid proteins and cell surface proteins facilitate the transduction of AAV and allow for its genome to be expressed. The ability of AAV to transduce cells in vivo have transformed it into a leader in gene delivery. Although much progress has been made in identifying AAV variants with improved tropism towards certain cell types, there are currently no AAVs that have been identified that show superior transduction efficiency of hematopoietic cells, including hematopoietic stem cells (HSCs).

[0483] Through in vivo screening of high complexity libraries and directed evolution, it is possible to identify modified AAV capsid proteins with increased tropism towards certain cell types. In this project, a pooled library of AAV9 capsid variants that differ within an inserted 7-mer region was generated. The library of ˜5×10\hat{ }6 AAV9 variants was screened with the goal of identifying variants that specifically target human and mouse hematopoietic cells in vivo. The library was injected retroorbitally into CD34+ humanized NSG mice and bone marrow was harvested 10-14 days after injection for further analysis. Sorted mouse cells, human cells, total live cell population and unsorted whole bone marrow was analyzed for DNA and RNA of the encoded 7mer sequences (FIG. 12).

[0484] The priority of this project is to identify tissue specific capsid variants that selectively target hematopoietic progenitors (of any lineage) over non-hematopoietic cell types. Moreover, through the inclusion of humanized mice into the experimental design applicant can potentially identify a capsid variant targeting human hematopoietic cells, as well as their mouse counterparts.

### Results

Pilot Experiment with WT Mouse Indicates how Many Cells are Needed to be Able to Detect Viral Sequence at DNA and RNA Level

[0485] Applicant has an AAV9 library (gSB114) composed of approximately 5×10\hat{ }6 variants with expression driven by the CMV promoter. Applicant injected 3 WT (C57BL6) mice: vehicle injection, (1E+11) low dose library, (5E+11) high dose library and harvested tissues from these mice after 14 days. Liver and spleen were harvested for later protein analysis, muscle and bone marrow was harvested for sorting. With the hope of detecting variants targeting discrete hematopoietic lineages, applicant sorted 200,000 lymphoid lineage cells, 200,000 myeloid-erythroid lineage cells, 200,000 myeloid progenitor cells, ˜28,000 MPP/ST-HSCs, and ˜4,000 HSCs. Those populations were sorted in Trizol for viral DNA and RNA isolation, followed by PCR amplification and sequencing of the capsid.

[0486] For almost all sorted populations, even with 200,000 cells, the inventors isolated low yield of DNA and RNA, which needed to be amplified 38 cycles at the PCR to be able to be detected. The inventors concluded to proceed with the high dose library and collect as many cells as possible. It was determined that it would not be possible to detect viral DNA/RNA from only HSCs, therefore the inventors decided to sort a bigger population containing HSCs in the next experiment.

Library Injection into Humanized Mice Guides Us about Our Sorting Strategy for Human Cells

[0487] The random peptide library (gSB114) was injected into 3 humanized mice at 5E+11vg/mouse dose and 1 mouse was injected with vehicle. After 14 days, the inventors harvested bone marrow and isolated 4,000-1,300 human lineage-negative (lin-) progenitors and HSCs, 150,000-200,000 human myeloid lineage cells, 180-1900 human erythroid lineage cells, 200,000 human lymphoid lineage cells.

[0488] Each population varied in frequency across different humanized mice, which might relate to the initial engraftment efficiency of human rather than viral transduction. With such a low number of cells, the inventors were unable to conclude about lineage specific enrichment of variants. However, based on DNA and mRNA sequencing, the inventors identified a short-list of ˜27,000 variants integrated. In order to increase the chances of finding promising variants next time, it was decided to sort only human and mouse origin cells, regardless of their differentiation status.

### The Identified Short-Listed Library Injection Guides Applicant to Further Optimize the Viral DNA/RNA Recovery

[0489] The inventors injected the second round of (short-listed) library (gSB144) into 4 humanized mice at 1.6E+12vg/mouse dose and harvested BM after 14 days. The inventors sorted 1×10\hat{ }6 human progenitors, 0.5×10\hat{ }6 mouse progenitors, 3×10\hat{ }6 alive cell population and several million of whole bone marrow cells.

[0490] The isolated DNA and RNA needed to be PCR amplified in many cycles, which is not optimal. However, the inventors still needed to increase the number of sorted cells. The sequencing results indicated some interesting variants, but the inventors decided to repeat the same library injection at a higher dose and harvest at 10 days post-injection, considering the possibility of silencing of the promoter in 14 days.

### Higher Dose Library Injection and Harvest at 10 Days Post-Injection Increased the Viral DNA/RNA Recovery, and LED Inventors to Pick 3 Candidate Variants

[0491] The second-round library (gSB144) was injected into 3 humanized mice at 3.2E+12vg/mouse and bone marrow was harvested 10 days post-injection. The inventors sorted 2×10\hat{ }6 human progenitors, 0.6-2×10\hat{ }6 mouse progenitors, 3×10\hat{ }6 alive cell population and several million of whole bone marrow cells.

[0492] The inventors optimized the strategy with the highest dose of virus, harvested after 10 days and sorted as many cells as possible for all populations. With this experimental strategy, the inventors finally reached the confidence of isolating a good amount of viral DNA and RNA, which does not require high cycles of PCR amplification. Based on the RNA expression of peptides found in human progenitor populations of multiple humanized mice, the inventors selected 3 candidate sequences (FIG. 12):

Variant #1:
(SEQ ID NO: 8002)
TGGVGVM
Variant #2:
(SEQ ID NO: 8003)
AGITGSG
Variant #3:
(SEQ ID NO: 8018)
NSVSGGS

[0493] The inventors continued with the cloning of these variants into pUCmini-iCap-PHP.eB plasmid to replace TLAVPFK (SEQ ID NO: 12012) peptide. In parallel, since this optimized strategy finally gives more power in screening, the inventors decided to repeat the injection of the first library at a higher dose and harvest the cells after 10 days.

Initial Random Peptide Library Screen is Repeated with the Optimized Strategy (High Dose, and Harvest at 10 Days Post-Injection)

[0494] A new library (gSB206) of ˜5×10\hat{ }6 random peptide variants inserted at amino acid position 587 was generated. The inventors injected that library into 3 humanized mice at 3.2E±12vg/mouse dose and harvested the bone marrow after 10 days. The inventors then sorted 2×10\hat{ }6 human progenitors, 0.5-1×10\hat{ }6 mouse progenitors, 3×10\hat{ }6 alive cell population and several million of whole bone marrow cells.

[0495] Based on the sequencing results, the inventors generated a short-listed library (second library second round). Candidates that were found at the RNA level within the first round of screening for this library were included in the generation of the second round of screening. By including a smaller pool of candidates to be tested, there is a greater representation of each variant within the library.

[0496] Since there is no known promoter with increased expression in hematopoietic cells. To increase the probability of expression, the inventors decided to generate this new library under two different promoters: CMV and CBh.

The Identified Short-Listed Library is Prepared with Two Different Promoters (CMV and CBh).

[0497] To test these two libraries, the inventors injected ˜2.4×10¹³ vg/mouse into 3 humanized NSG mice per promoter-specific library, retro-orbitally. Two control mice were included in the study. 10 days post-injection the mice were harvested, and three populations were FACs sorted into 1 mL of Trizol and were sequenced. Quantities of cells collected per population were as follows: 3×10⁶ alive cells, 2-4×10⁵ mouse progenitors, and 2×10⁶ human progenitors. Based on the sequencing results four more candidates were identified (FIG. 12):

Variant #4:
(SEQ ID NO: 11)
VKSYGAL
Variant #5:
(SEQ ID NO: 2)
VKIYGAL
Variant #6:
(SEQ ID NO: 37)
RRERTEQ
Variant #7:
(SEQ ID NO: 7)
VKVYGAL

Following Our Selection of Potential Top Candidates, the Inventors have Begun to Clone Individual Candidates for Preparation of AAV.

[0498] The inventors integrated the 7-mer capsid variants into the AAV9 rep/cap plasmid (pUCmini-iCAP-PHP.eB) by utilizing Gibson Assembly Technology. This technology allows the assembly of multiple linearized vectors by tethering fragments based on homology incorporated into 20 bp overlaps. To linearize the AAV9 capsid plasmid applicant utilized two high fidelity restriction enzymes, BsiWI and AgeI. To generate the capsid variants, applicant designed gBlock gene fragments that replaced the TLAVPFK (SEQ ID NO: 12012) peptide at amino acid position 588 for first library top candidates and amino acid position 587 (GTLAVPF (SEQ ID NO: 12013) peptide) for the second library candidates. The transduction efficiency of these capsid variants will be assessed through the delivery of a self-complementary vector that delivers mCherry driven by the chicken beta actin hybrid (Cbh) promoter along with the helper plasmid pAdDeltaF6.

### Example 6—In Situ Gene Delivery and Genome Modification Targeted to Blood and Immune Cells

[0499] The overarching goal of this project is to establish a system for robust, selective in vivo transduction of mature and immature blood and immune cells using recombinant AAVs that can deliver transgenes and gene editors for therapeutic applications. Prior work has demonstrated the ability of multiple AAV serotypes to deliver genome-modifying enzymes to blood lineage (hematopoietic) cells in situ in mice. The studies described here will extend these efforts to human blood cells (using xenografted mice) and to novel AAV variants that may offer increased potency and unique selectivity for particular subsets of hematopoietic cells.

[0500] Described are a novel class of AAV gene transfer vectors (HematoAAVs) that display preferential tropism for human blood lineage cells. In addition, the inventors will generate proof-of-concept data documenting the feasibility and efficacy of a novel therapeutic strategy—direct, in situ modification of blood cells—for the treatment of genetic diseases of the hematopoietic system.

### Identify Potent and Selective AAV Capsids for Transduction of Human Blood Cell Populations Using Xenograft Models and Fluorescent Reporter Systems

### In Vivo Scale Manufacture and Testing of Candidate HematoAAVs

[0501] Initial studies are aimed at identifying potent and selective AAV capsid variants that can be used to transduce human blood cells in vivo and in vitro. The inventors completed two in vivo screens of high complexity variant capsid libraries in “humanized” mice and generated prioritized lists of variants enriched in mouse and human bone marrow cells (candidate “HematoAAVs”). The identified highest priority candidate HematoAAV variants are to be screened using direct detection of transduced cells by expression of AAV-encoded fluorescent protein or lineage tracing by delivery of AAV-encoded CRISPR/Cas. The high priority candidates were selected based on: representation among the library, number of animals in which detected, and detection of synonymous variant sequences.

[0502] The inventors have cloned the identified high priority capsid variants and used the resulting plasmid constructs to manufacture different gene transfer vectors encoding GFP, expressed from the CBh promoter (Cbh-Gfp, FIG. 13). These variants include 3 with peptide insertion at aa588 and 4 with peptide insertion at aa587. Together, they represent 4 different commonly appearing sequence features seen across multiple bone marrow-enriched variants. The inventors have produced and HPLC-purified AAV for all of the capsid candidates using a self-complementary AAV (scAAV) transfer vector. The viral titers of the capsids were quantified using quantitative PCR of the BGh polyadenylation element included in the transfer vector (FIG. 14). Titers varied slightly across different variants, but most produced viral particles with similar efficiencies as the parental AAV9 serotype.

[0503] To test the bioactivity of the capsids produced, the human erythroleukemia K562 cell line was transduced with 1e5 vg/cell (FIGS. 15A-15B). GFP expression was detected in all conditions, demonstrating the transduction capacity of all of the variant capsids produced. These in vitro results suggested modestly superior transduction rates in this assay with the S2-4 variant. In addition to pursuing the high priority variants, the inventors additionally analyzed the two lists of capsid variants obtained from in vivo screens using a computational strategy to identify different motif families with shared sequence motifs.

Ex Vivo Transduction of HSPCs and T Cells with Candidate HematoAAVs

[0504] Two of the candidate variants (S1-MF1-B and S2-MF1-E) were manufactured alone with the parental AAV9 vector as a control for delivery of Chh-Gfp. As an initial test of vector bioactivity, the inventors evaluated the ability of the candidate variants to transduce human peripheral blood mononuclear cells (PBMCs) in vitro. 250,000 PBMCs were transduced with either 1e5 vg/cell or 5e5 vg/cell and were analyzed after 41 hours.

[0505] The results from these studies indicate that S1-MF1-B variant may transduce human hematopoietic cells (hCD45+), including hematopoietic stem and progenitor cells (hCD45+, hCD34+), human myeloid cells (hCD45+, hCD33+) at high efficiency than parental AAV9 (i.e., SI-MF1-B generates a greater fraction of GFP+ cells at the lower viral titer). Transduction of T cells also appears slightly more efficient with S2-MF1-B; however, none of the vectors produced >2% GFP+ T cells. Similarly, transduction of B cells was negligible for all AAVs tested. The second variant tested in the assay, S2-MF1-E, did not exhibit higher transduction activity than AAV9 for any of the population tests (FIGS. 16A-16B). Results with S2-MF1-B will be verified using cells from a distinct human donor.

Testing the Feasibility and Efficiency of Applying Therapeutic Gene Delivery In Vivo in a Therapeutically Relevant Pre-Clinical Model The inventors will test the HematoAAV system for therapeutic applications, such as for human hemoglobinopathies. Two different strategies shown to be effective for HbF induction in human cell culture and transplant models will be compared: 1) introduce a deletion into the γ-globin (HBG) promoter sequences (HBG1 and HBG2, chromosome 11) to recapitulate human mutations that cause hereditary persistence of fetal hemoglobin (HPFH); and 2) target the erythroid enhancer region of BCL11a (BCL11A-ee, chromosome 2) to lower production of BCL11A, which normally suppresses HbF, thereby specifically alleviating HbF repression in the red blood cell lineage. The HematoAAV concept will additionally be tested for translational potential in targeting CCR5 to effect HIV resistance. The necessary gene editing tools and reagents are being generated and validated, including targeting systems compatible with CasMINI or SauriCas9.

### Design, Cloning, and Testing of CasMINI Compatible HBG, BCL11A-Ee and CCR5 Targeting Systems

[0506] CasMINI compatible guides for CCR5 have been designed and cloned into expression plasmids for in vitro tested in K562 cells. In addition, several validated guide RNAs for targeting of HBG have been identified. Finally, the design of several BCL11A-ee-targeting guides was completed, and these guides will be subject to further in silico analysis and prioritized for in vitro testing. Sequences of the guides to be used are included in Tables 4 and 5.

TABLE 4
CasMINI compatible gRNAs to be tested for targeting of CCR5 and HBG
CCR5 CasMINI sgRNA Candidates

| sgRNA | PAM 5′ | | |
|---|---|---|---|
| Nomenclature | (TTTR) | Spacer targeting CCR5 (5′→3′) | SEQ ID NO: |
| sgCCR5_CM_1 | TTTG | gttttgtgggcaacatgctg | 12014 |
| sgCCR5_CM_2 | TTTG | tgggcaacatgctggtcatc | 12015 |
| sgCCR5_CM_3 | TTTG | ctttaaaagccaggacggtc | 12016 |
| sgCCR5_CM_4 | TTTA | ccagatctcaaaaagaaggt | 12017 |
| sgCCR5_CM_5 | TTTG | gcagggctccgatgtataat | 12018 |
| sgCCR5_CM_6 | TTTA | catacagtcagtatcaattctgg | 12019 |
| sgCCR5_CM_7 | TTTA | tcaggatgaggatgaccagc | 12020 |
| sgCCR5 CM 8 | TTTG | cgtctctcccaggaatcatc | 12021 |

HBG promoter CasMINI sgRNA Candidates (Xu et al., Molecular Cell, 2021)

| sgRNA | PAM 5′ | Spacer targeting HBG promoter | |
|---|---|---|---|
| Nomenclature | (TTTR) | (5′→3′) | SEQ ID NO: |
| sgHBG_CM_1 | TTTG | CCTTGTCAAGGCTATTGGTCAAG | 12022 |
| sgHBG_CM_2 | TTTA | GCCAGGGACCGTTTCAGACAGAT | 12023 |
| sgHBG CM 3 | TTTC | AGACAGATATTTGCATTGAGATA | 12024 |
| sgHBG_CM_4 | TTTG | CATTGAGATAGTGTGGGGAAGGG | 12025 |
| sgHBG_CM_5 | TTTA | TTCTTCATCCCTAGCCAGCCGCC | 12026 |

TABLE 5
CasMINI compatible gRNAs to be tested for targeting of BCL11A-ee
BCL11Aee CasMINI sgRNA Candidates

| sgRNA Nomenclature | PAM 5′ | spacer (5′→3′) | SEQ ID NO: |
|---|---|---|---|
| sgBCL11A_CM_1 | TTTG | aagctagtctagtgcaagct | 12027 |
| sgBCL11A_CM_2 | TTTA | tcacaggctccaggaagggt | 12028 |
| sgBCL11A_CM_3 | TTTG | gcctctgattagggtggggg | 12029 |
| sgBCL11A_CM_4 | TTTG | cccaggggggcctctttcgg | 12030 |
| sgBCL11A_CM_5 | TTTC | tggcctatgttattacctgt | 12031 |
| sgBCL11A_CM_6 | TTTG | cactggaatcagctatctgc | 12032 |
| sgBCL11A_CM_7 | TTTC | tcaatgggaatgaaataatt | 12033 |
| sgBCL11A_CM_8 | TTTC | attcccattgagaaataaaa | 12034 |

### Cloning of Published SauriCas9 Compatible HBG, BCL11A-Ee and CCR5 Targeting Systems

[0507] The overlapping PAM requirement of SauriCas9 (NNGG) with that of SpCas9 (NGG) allows for several previously validated gRNAs to be repurposed, including those currently in clinical trials employing ex vivo editing and transplantation of autologous cells for the targeting of BCL11A and HBG by SauriCas9.

[0508] For CCR5, 10 different candidate SauriCas9 compatible gRNAs have been designed and cloned (Table 6) into relevant expression plasmids for in vitro testing in K562 cells.

TABLE 6
Candidate SauriCas9 compatible gRNAs for targeted disruption of human
CCR5
CCR5 Sauricas9 sgRNA Candidates

| sgRNA | sgRNA sequence | | |
|---|---|---|---|
| Nomenclature | (Pam underlined) | Publication | SEQ ID NO |
| CCR5-sauri-A | AACACCAGTGAGTAGAGCGGAGG | Shasha Li et | 12035 |
| | | al., Molecular | |
| | | Therapy, | |
| | | 2022 | |
| CCR5-sauri-B | TCACTATGCTGCCGCCCAGTTGG | Pankaj K. | 12036 |
| | | Mandal et al., | |
| | | Cell Stem | |
| | | Cell, 2014 | |
| CCR5-sauri-C | GCTGCCGCCCAGTGGGACTTTGG | Pankaj K. | 12037 |
| | | Mandal et al., | |
| | | Cell Stem | |
| | | Cell, 2014 | |
| CCR5-sauri-D | ACAATGTGTCAACTCTTGACAGG | Pankaj K. | 12038 |
| | | Mandal et al., | |
| | | Cell Stem | |
| | | Cell, 2014 | |
| CCR5-sauri-E | GCTGTGTTTGCGTCTCTCCCAGG | Pankaj K. | 12039 |
| | | Mandal et al., | |
| | | Cell Stem | |
| | | Cell, 2014 | |
| CCR5-sauri-F | GATCTGGTAAAGATGATTCCTGG | Pankaj K. | 12040 |
| | | Mandal et al., | |
| | | Cell Stem | |
| | | Cell, 2014 | |
| CCR5-Sauri-G | GACTATGCTGCCGCCCAGTAGG | Lei Xu et al., | 12041 |
| | | Molecular | |
| | | Therapy, | |
| | | 2017 | |
| CCR5-Sauri-H | GCAGAAGGGGACAGTAAGAAGG | Lei Xu et al., | 12042 |
| | | Molecular | |
| | | Therapy, | |
| | | 2017 | |
| CCR5-Sauri-I | CAGAATTGATACTGACTGTATGG | Xiangjin | 12043 |
| | | Kang ct al., | |
| | | Technological | |
| | | Innovations, | |
| | | 2016 | |
| CCR5-Sauri-J | AGATGACTATCTTTAATGTCTGG | Xiangjin | 12044 |
| | | Kang et al., | |
| | | Technological | |
| | | Innovations, | |
| | | 2016 | |

What is claimed is:

1. A composition comprising:
a targeting moiety effective to target a hematopoietic cell, wherein the targeting moiety comprises one or more n-mer motifs, wherein at least one n-mer motif comprises or consists of
a. any one of SEQ ID NOs: 1-1000;
b. any one of SEQ ID NOs: 2001-3000;
c. any one of SEQ ID NOs: 4001-5000;
d. any one of SEQ ID NOs: 6001-7000;
e. any one of SEQ ID NOs: 8001-9000;
f. any one of SEQ ID NOs: 10001-11000;
g. or any combination thereof.

2. (canceled)

3. The composition of claim 1, wherein the targeting moiety comprises a polypeptide, a polynucleotide, a lipid, a polymer, a sugar, or any combination thereof.

4.-7. (canceled)

8. The composition of claim 1, wherein the target moiety comprises a viral polypeptide, a viral capsid polypeptide, an adeno associated virus (AAV) polypeptide, or an adeno associated virus (AAV) capsid polypeptide,
wherein the n-mer motif is inserted between any two amino acids of the viral polypeptide, viral capsid polypeptide, AAV polypeptide, or AAV capsid polypeptide, or wherein the n-mer motif is inserted into the viral polypeptide, viral capsid polypeptide, AAV polypeptide, or AAV capsid polypeptide such that 1, 2, or more N-terminal and/or C-terminal amino acids of the n-mer motif replaces 1, 2, or more amino acids of the viral polypeptide, viral capsid polypeptide, AAV polypeptide, or AAV capsid polypeptide.

9. (canceled)

10. The composition of claim 8, wherein the n-mer motif is inserted between any two contiguous amino acids between amino acids 262-269, 327-332, 382-386, 452-460, 488-505, 527-539, 545-558, 581-593, 598-599, 704-714, or any combination thereof in an AAV9 capsid polypeptide or in an analogous position in an AAV1, AAV2, AAV3, AAV4, AAV5, AAV6, AAV7, AAV8, AAV rh.74, AAV rh.10 capsid polypeptide.

11. The composition of claim 8, wherein the AAV capsid polypeptide is an engineered AAV capsid polypeptide having reduced or eliminated uptake in a non-hematopoietic cell as compared to a corresponding wild-type AAV capsid polypeptide.

12. (canceled)

13. (canceled)

14. The composition of claim 11, wherein the engineered AAV capsid polypeptide comprises one or more mutations that result in reduced or eliminated uptake in a non-hematopoietic cell.

15. The composition of claim 14, wherein the one or more mutations are
a. in position 267,
b. in position 269,
c. in position 504,
d. in position 505,
e. in position 590,
f. or any combination thereof
in the AAV9 capsid protein (SEQ ID NO: 12001) or in one or more positions corresponding thereto in a non-AAV9 capsid polypeptide.

16. (canceled)

17. The composition of claim 15, wherein the mutation in position 267 in the AAV9 capsid protein (SEQ ID NO: 12001) or position corresponding thereto in a non-AAV9 capsid polypeptide is a G or X mutation to A, wherein X is any amino acid, and/or
wherein the mutation in position 269 in the AAV9 capsid protein (SEQ ID NO: 12001) or position corresponding thereto in a non-AAV9 capsid polypeptide is an S or X to T mutation, wherein X is any amino acid, and/or
wherein the mutation in position 504 in the AAV9 capsid protein (SEQ ID NO: 12001) or position corresponding thereto in a non-AAV9 capsid polypeptide is a G or X to A mutation, wherein X is any amino acid, and/or
wherein the mutation in position 505 in the AAV9 capsid protein (SEQ ID NO: 12001) or position corresponding thereto in a non-AAV9 capsid polypeptide is a P or X to A mutation, wherein X is any amino acid, and/or
wherein the mutation in position 590 in the AAV9 capsid protein (SEQ ID NO: 12001) or position corresponding thereto in a non-AAV9 capsid polypeptide is a Q or X to A mutation, wherein X is any amino acid.

18.-21. (canceled)

22. The composition of claim 15, wherein the engineered AAV capsid protein is an engineered AAV9 capsid polypeptide comprising a mutation at position 267, position 269 or both of a wild-type AAV9 capsid protein (SEQ ID NO: 12001), wherein the mutation at position 267 is a G to A mutation and wherein the mutation at position 269 is an S to T mutation, or
wherein the engineered AAV capsid protein is an engineered AAV9 capsid polypeptide comprising a mutation at position 590 of a wildtype AAV9 capsid protein (SEQ ID NO: 12001), wherein the mutation at position 509 is a Q to A mutation, or
wherein the engineered AAV capsid protein is an engineered AAV9 capsid polypeptide comprising a mutation at position 504, position 505, or both of a wild-type AAV9 capsid protein (SEQ ID NO: 12001), wherein the mutation at position 504 is a G to A mutation and wherein the mutation at position 505 is a P to A mutation.

23. (canceled)

24. (canceled)

25. (canceled)

26. (canceled)

27. The composition of claim 1, further comprising a cargo, wherein the cargo is coupled to or is otherwise associated with the targeting moiety.

28. (canceled)

29. A vector system comprising:
a vector comprising:
one or more polynucleotides, wherein at least one of the one or more polynucleotides encodes all or part of a targeting moiety effective to target a hematopoietic cell, wherein the targeting moiety comprises one or more n-mer motifs, wherein at least one nmer motif comprises or consists of
a. any one of SEQ ID NOs: 1-1000;
b. any one of SEQ ID NOs: 2001-3000;
c. any one of SEQ ID NOs: 4001-5000;
d. any one of SEQ ID NOs: 6001-7000;
e. any one of SEQ ID NOs: 8001-9000;
f. any one of SEQ ID NOs: 10001-11000;
g. or any combination thereof; and
optionally, a regulatory element operatively coupled to one or more of the one or more polynucleotides.

30. The vector system of claim 29, further comprising a cargo polynucleotide, wherein the cargo polynucleotide is optionally operatively coupled to the at least one polynucleotide that encodes all or part of the targeting moiety.

31. The vector system of claim 29, wherein the vector system is capable of producing a polypeptide comprising or consisting of the targeting moiety.

32.-48. (canceled)

49. A polynucleotide that encodes all or part of a composition of claim 1.

50. A polypeptide encoded by a vector system of claim 29.

51. (canceled)

52. A particle, optionally a viral particle, produced by a vector system of claim 29.

53. (canceled)

54. (canceled)

55. (canceled)

56. A cell comprising:
a composition of claim 1.

57. (canceled)

58. (canceled)

59. A pharmaceutical formulation comprising:
a composition of claim 1; and
a pharmaceutically acceptable carrier.

60. A method of treating or preventing a disease, optionally a blood disease, or a symptom thereof in a subject in need thereof, comprising:
administering to the subject in need thereof a composition of claim 1.

61. A composition comprising:
a targeting moiety effective to target a hematopoietic cell, wherein the targeting moiety comprises one or more n-mer motifs, wherein at least one n-mer motif comprises or consists of VKXₙ, wherein Xₙ is each selected from any amino acid, wherein n is 5 or a targeting moiety effective to target a hematopoietic cell, wherein the targeting moiety comprises one or more n-mer motifs, wherein at least one n-mer motif comprises or consists of VKXₙYGAL, wherein Xₙ is each selected from any amino acid, wherein n is 1; and
optionally a cargo, wherein the cargo is coupled to or is otherwise associated with the targeting moiety.

62. (canceled)

The application's sequence listing, which the Patent Office published only in electronic form, follows.

SEQUENCE LISTING (12049 sequences)

SEQ ID NO: 1 - protein, 7 aa, synthetic construct
VKVYGAL

SEQ ID NO: 2 - protein, 7 aa, synthetic construct
VKIYGAL

SEQ ID NO: 3 - protein, 7 aa, synthetic construct
LLDKWTA

SEQ ID NO: 4 - protein, 7 aa, synthetic construct
KKETMIL

SEQ ID NO: 5 - protein, 7 aa, synthetic construct
HAPPAMV

SEQ ID NO: 6 - protein, 7 aa, synthetic construct
SSLGNHS

SEQ ID NO: 7 - protein, 7 aa, synthetic construct
VKVYGAL

SEQ ID NO: 8 - protein, 7 aa, synthetic construct
SEPGVSV

SEQ ID NO: 9 - protein, 7 aa, synthetic construct
LLKNGLI

SEQ ID NO: 10 - protein, 7 aa, synthetic construct
LVKDVNQ

SEQ ID NO: 11 - protein, 7 aa, synthetic construct
VKSYGAL

SEQ ID NO: 12 - protein, 7 aa, synthetic construct
PLSSANL

SEQ ID NO: 13 - protein, 7 aa, synthetic construct
VRLSEHI

SEQ ID NO: 14 - protein, 7 aa, synthetic construct
HLVADGV

SEQ ID NO: 15 - protein, 7 aa, synthetic construct
LLHTTAN

SEQ ID NO: 16 - protein, 7 aa, synthetic construct
NRNASDN

SEQ ID NO: 17 - protein, 7 aa, synthetic construct
PMNGITN

SEQ ID NO: 18 - protein, 7 aa, synthetic construct
LVKNGHI

SEQ ID NO: 19 - protein, 7 aa, synthetic construct
VKQGGEQ

SEQ ID NO: 20 - protein, 7 aa, synthetic construct
SLVQNVH

SEQ ID NO: 21 - protein, 7 aa, synthetic construct
ETATKSI

SEQ ID NO: 22 - protein, 7 aa, synthetic construct
GDPNREK

SEQ ID NO: 23 - protein, 7 aa, synthetic construct
SESKNLA

SEQ ID NO: 24 - protein, 7 aa, synthetic construct
SRNGITN

SEQ ID NO: 25 - protein, 7 aa, synthetic construct
ASRIDTS

SEQ ID NO: 26 - protein, 7 aa, synthetic construct
GKQGENQ

SEQ ID NO: 27 - protein, 7 aa, synthetic construct
ATRLSEV

SEQ ID NO: 28 - protein, 7 aa, synthetic construct
PRVGDTP

SEQ ID NO: 29 - protein, 7 aa, synthetic construct
VTVGNGF

SEQ ID NO: 30 - protein, 7 aa, synthetic construct
GLGGNRE

SEQ ID NO: 31 - protein, 7 aa, synthetic construct
NKNTSDN

SEQ ID NO: 32 - protein, 7 aa, synthetic construct
IKIYGAL

SEQ ID NO: 33 - protein, 7 aa, synthetic construct
TSPNNSV

SEQ ID NO: 34 - protein, 7 aa, synthetic construct
GMQGVSN

SEQ ID NO: 35 - protein, 7 aa, synthetic construct
KLAHNYD

SEQ ID NO: 36 - protein, 7 aa, synthetic construct
GLTGYTH

SEQ ID NO: 37 - protein, 7 aa, synthetic construct
RRERTEQ

SEQ ID NO: 38 - protein, 7 aa, synthetic construct
RSERTEQ

SEQ ID NO: 39 - protein, 7 aa, synthetic construct
PESSANL

SEQ ID NO: 40 - protein, 7 aa, synthetic construct
PTRGENM

SEQ ID NO: 41 - protein, 7 aa, synthetic construct
NGKGIEM

SEQ ID NO: 42 - protein, 7 aa, synthetic construct
TSPKNSE

SEQ ID NO: 43 - protein, 7 aa, synthetic construct
GRASADN

SEQ ID NO: 44 - protein, 7 aa, synthetic construct
ASQEPSR

SEQ ID NO: 45 - protein, 7 aa, synthetic construct
AVSVGQK

SEQ ID NO: 46 - protein, 7 aa, synthetic construct
RTSNSEI

SEQ ID NO: 47 - protein, 7 aa, synthetic construct
LMNGITN

SEQ ID NO: 48 - protein, 7 aa, synthetic construct
GMAIVED

SEQ ID NO: 49 - protein, 7 aa, synthetic construct
TGERNQV

SEQ ID NO: 50 - protein, 7 aa, synthetic construct
RNAPNID

SEQ ID NO: 51 - protein, 7 aa, synthetic construct
TSPKKSE

SEQ ID NO: 52 - protein, 7 aa, synthetic construct
NLVSSAM

SEQ ID NO: 53 - protein, 7 aa, synthetic construct
ALSAGQK

SEQ ID NO: 54 - protein, 7 aa, synthetic construct
RSAPNMD

SEQ ID NO: 55 - protein, 7 aa, synthetic construct
GVSAKVQ

SEQ ID NO: 56 - protein, 7 aa, synthetic construct
AHERGQL

SEQ ID NO: 57 - protein, 7 aa, synthetic construct
ALSVGQK

SEQ ID NO: 58 - protein, 7 aa, synthetic construct
IRDQTAI

SEQ ID NO: 59 - protein, 7 aa, synthetic construct
DVKSDNE

SEQ ID NO: 60 - protein, 7 aa, synthetic construct
NNTEGTR

SEQ ID NO: 61 - protein, 7 aa, synthetic construct
KETQHLI

SEQ ID NO: 62 - protein, 7 aa, synthetic construct
SSEKISS

SEQ ID NO: 63 - protein, 7 aa, synthetic construct
TGDRNQV

SEQ ID NO: 64 - protein, 7 aa, synthetic construct
GRHNEIT

SEQ ID NO: 65 - protein, 7 aa, synthetic construct
EIKPIDR

SEQ ID NO: 66 - protein, 7 aa, synthetic construct
SESRQED

SEQ ID NO: 67 - protein, 7 aa, synthetic construct
RTSNSDI

SEQ ID NO: 68 - protein, 7 aa, synthetic construct
SDPKIHK

SEQ ID NO: 69 - protein, 7 aa, synthetic construct
RRDLLDG

SEQ ID NO: 70 - protein, 7 aa, synthetic construct
GSFHVEM

SEQ ID NO: 71 - protein, 7 aa, synthetic construct
QNTGGSS

SEQ ID NO: 72 - protein, 7 aa, synthetic construct
ILNGMVL

SEQ ID NO: 73 - protein, 7 aa, synthetic construct
GNKLHID

SEQ ID NO: 74 - protein, 7 aa, synthetic construct
LATSRGS

SEQ ID NO: 75 - protein, 7 aa, synthetic construct
KLGHNYG

SEQ ID NO: 76 - protein, 7 aa, synthetic construct
TGLAVHS

SEQ ID NO: 77 - protein, 7 aa, synthetic construct
TIHNVII

SEQ ID NO: 78 - protein, 7 aa, synthetic construct
VGRERAI

SEQ ID NO: 79 - protein, 7 aa, synthetic construct
TIHQVIN

SEQ ID NO: 80 - protein, 7 aa, synthetic construct
NSGDNRL

SEQ ID NO: 81 - protein, 7 aa, synthetic construct
GLGSTRE

SEQ ID NO: 82 - protein, 7 aa, synthetic construct
MKDKMIL

SEQ ID NO: 83 - protein, 7 aa, synthetic construct
PTRGENE

SEQ ID NO: 84 - protein, 7 aa, synthetic construct
AKAPGTG

SEQ ID NO: 85 - protein, 7 aa, synthetic construct
GYVLKTS

SEQ ID NO: 86 - protein, 7 aa, synthetic construct
VTIGNGL

SEQ ID NO: 87 - protein, 7 aa, synthetic construct
WKETQGD

SEQ ID NO: 88 - protein, 7 aa, synthetic construct
EHDASRN

SEQ ID NO: 89 - protein, 7 aa, synthetic construct
MVTQHLI

SEQ ID NO: 90 - protein, 7 aa, synthetic construct
KDPGSAA

SEQ ID NO: 91 - protein, 7 aa, synthetic construct
KREDYNH

SEQ ID NO: 92 - protein, 7 aa, synthetic construct
SWGNIQT

SEQ ID NO: 93 - protein, 7 aa, synthetic construct
SQGAESI

SEQ ID NO: 94 - protein, 7 aa, synthetic construct
GVMQTQN

SEQ ID NO: 95 - protein, 7 aa, synthetic construct
GIIQTQN

SEQ ID NO: 96 - protein, 7 aa, synthetic construct
NQTESRG

SEQ ID NO: 97 - protein, 7 aa, synthetic construct
PENTKIN

SEQ ID NO: 98 - protein, 7 aa, synthetic construct
GLTGYPH

SEQ ID NO: 99 - protein, 7 aa, synthetic construct
SRDDTIS

SEQ ID NO: 100 - protein, 7 aa, synthetic construct
SGSRDTR

SEQ ID NO: 101 - protein, 7 aa, synthetic construct
TNHQDNK

SEQ ID NO: 102 - protein, 7 aa, synthetic construct
LGSESAI

SEQ ID NO: 103 - protein, 7 aa, synthetic construct
RTSNGDI

SEQ ID NO: 104 - protein, 7 aa, synthetic construct
PYNLLSS

SEQ ID NO: 105 - protein, 7 aa, synthetic construct
YLKNNDM

SEQ ID NO: 106 - protein, 7 aa, synthetic construct
GAREEHT

SEQ ID NO: 107 - protein, 7 aa, synthetic construct
EKVVKVT

SEQ ID NO: 108 - protein, 7 aa, synthetic construct
LHDFSTA

SEQ ID NO: 109 - protein, 7 aa, synthetic construct
VHASAAN

SEQ ID NO: 110 - protein, 7 aa, synthetic construct
GVSASVH

SEQ ID NO: 111 - protein, 7 aa, synthetic construct
LRERDGH

SEQ ID NO: 112 - protein, 7 aa, synthetic construct
KGLINQQ

SEQ ID NO: 113 - protein, 7 aa, synthetic construct
SGLSGKM

SEQ ID NO: 114 - protein, 7 aa, synthetic construct
SVGLTKI

SEQ ID NO: 115 - protein, 7 aa, synthetic construct
DKVGVAV

SEQ ID NO: 116 - protein, 7 aa, synthetic construct
RDDRDAR

SEQ ID NO: 117 - protein, 7 aa, synthetic construct
PKLETVL

SEQ ID NO: 118 - protein, 7 aa, synthetic construct
GLGGTPE

SEQ ID NO: 119 - protein, 7 aa, synthetic construct
SKPETVL

SEQ ID NO: 120 - protein, 7 aa, synthetic construct
ELSRLTL

SEQ ID NO: 121 - protein, 7 aa, synthetic construct
QIRGMGM

SEQ ID NO: 122 - protein, 7 aa, synthetic construct
TEPGMSV

SEQ ID NO: 123 - protein, 7 aa, synthetic construct
PGTYGGE

SEQ ID NO: 124 - protein, 7 aa, synthetic construct
GMAIVEN

SEQ ID NO: 125 - protein, 7 aa, synthetic construct
GTRLSEG

SEQ ID NO: 126 - protein, 7 aa, synthetic construct
VQQAQAQ

SEQ ID NO: 127 - protein, 7 aa, synthetic construct
TEVQAQA

SEQ ID NO: 128 - protein, 7 aa, synthetic construct
LTDTKLP

SEQ ID NO: 129 - protein, 7 aa, synthetic construct
VGSKSAI

SEQ ID NO: 130 - protein, 7 aa, synthetic construct
AHDRGQL

SEQ ID NO: 131 - protein, 7 aa, synthetic construct
GLSQKML

SEQ ID NO: 132 - protein, 7 aa, synthetic construct
DSEKRDL

SEQ ID NO: 133 - protein, 7 aa, synthetic construct
SERRQAD

SEQ ID NO: 134 - protein, 7 aa, synthetic construct
RLGHSMD

SEQ ID NO: 135 - protein, 7 aa, synthetic construct
KAVDGIV

SEQ ID NO: 136 - protein, 7 aa, synthetic construct
FTLKGSG

SEQ ID NO: 137 - protein, 7 aa, synthetic construct
QIRGMET

SEQ ID NO: 138 - protein, 7 aa, synthetic construct
GFGLSGN

SEQ ID NO: 139 - protein, 7 aa, synthetic construct
PGSYGVS

SEQ ID NO: 140 - protein, 7 aa, synthetic construct
GFLSGPV

SEQ ID NO: 141 - protein, 7 aa, synthetic construct
QTIGNGF

SEQ ID NO: 142 - protein, 7 aa, synthetic construct
TTANNSE

SEQ ID NO: 143 - protein, 7 aa, synthetic construct
RLNHLDT

SEQ ID NO: 144 - protein, 7 aa, synthetic construct
ATRLSDV

SEQ ID NO: 145 - protein, 7 aa, synthetic construct
NDPKIHK

SEQ ID NO: 146 - protein, 7 aa, synthetic construct
GTNSKMV

SEQ ID NO: 147 - protein, 7 aa, synthetic construct
VSNFATH

SEQ ID NO: 148 - protein, 7 aa, synthetic construct
MNGVSPH

SEQ ID NO: 149 - protein, 7 aa, synthetic construct
TRNVIEG

SEQ ID NO: 150 - protein, 7 aa, synthetic construct
LKEPMML

SEQ ID NO: 151 - protein, 7 aa, synthetic construct
GKMNVHS

SEQ ID NO: 152 - protein, 7 aa, synthetic construct
MMKIGTG

SEQ ID NO: 153 - protein, 7 aa, synthetic construct
DLRTSTL

SEQ ID NO: 154 - protein, 7 aa, synthetic construct
EKGKLIA

SEQ ID NO: 155 - protein, 7 aa, synthetic construct
QQGVSSP

SEQ ID NO: 156 - protein, 7 aa, synthetic construct
RMTRDDT

SEQ ID NO: 157 - protein, 7 aa, synthetic construct
IDRFESS

SEQ ID NO: 158 - protein, 7 aa, synthetic construct
LRVGDTL

SEQ ID NO: 159 - protein, 7 aa, synthetic construct
QIRGMEI

SEQ ID NO: 160 - protein, 7 aa, synthetic construct
LVREGRE

SEQ ID NO: 161 - protein, 7 aa, synthetic construct
EIVNAVR

SEQ ID NO: 162 - protein, 7 aa, synthetic construct
TGKGIES

SEQ ID NO: 163 - protein, 7 aa, synthetic construct
GHEDNQH

SEQ ID NO: 164 - protein, 7 aa, synthetic construct
KLSHNYD

SEQ ID NO: 165 - protein, 7 aa, synthetic construct
QIRGMET

SEQ ID NO: 166 - protein, 7 aa, synthetic construct
DKANLHT

SEQ ID NO: 167 - protein, 7 aa, synthetic construct
KNTTGVS

SEQ ID NO: 168 - protein, 7 aa, synthetic construct
DVVNPGK

SEQ ID NO: 169 - protein, 7 aa, synthetic construct
QLSTAST

SEQ ID NO: 170 - protein, 7 aa, synthetic construct
NEVGTKS

SEQ ID NO: 171 - protein, 7 aa, synthetic construct
KWSVNLE

SEQ ID NO: 172 - protein, 7 aa, synthetic construct
NGFAVHS

SEQ ID NO: 173 - protein, 7 aa, synthetic construct
NVVSSSM

SEQ ID NO: 174 - protein, 7 aa, synthetic construct
TINQVIK

SEQ ID NO: 175 - protein, 7 aa, synthetic construct
QVVSSTV

SEQ ID NO: 176 - protein, 7 aa, synthetic construct
ATNSEKV

SEQ ID NO: 177 - protein, 7 aa, synthetic construct
VTATKSI

SEQ ID NO: 178 - protein, 7 aa, synthetic construct
NIHKVIM

SEQ ID NO: 179 - protein, 7 aa, synthetic construct
HIKSSET

SEQ ID NO: 180 - protein, 7 aa, synthetic construct
FINNLQM

SEQ ID NO: 181 - protein, 7 aa, synthetic construct
ADGLSKM

SEQ ID NO: 182 - protein, 7 aa, synthetic construct
EKSPSVM

SEQ ID NO: 183 - protein, 7 aa, synthetic construct
SGAMGGV

SEQ ID NO: 184 - protein, 7 aa, synthetic construct
QQGDTSS

SEQ ID NO: 185 - protein, 7 aa, synthetic construct
DRDGNKL

SEQ ID NO: 186 - protein, 7 aa, synthetic construct
LVKDLTQ

SEQ ID NO: 187 - protein, 7 aa, synthetic construct
VPQAQAQ

SEQ ID NO: 188 - protein, 7 aa, synthetic construct
GSLTETR

SEQ ID NO: 189 - protein, 7 aa, synthetic construct
NHTESRG

SEQ ID NO: 190 - protein, 7 aa, synthetic construct
WKETQAV

SEQ ID NO: 191 - protein, 7 aa, synthetic construct
GVDNAGR

SEQ ID NO: 192 - protein, 7 aa, synthetic construct
NSMGERG

SEQ ID NO: 193 - protein, 7 aa, synthetic construct
GLTRVSD

SEQ ID NO: 194 - protein, 7 aa, synthetic construct
TRSPPVS

SEQ ID NO: 195 - protein, 7 aa, synthetic construct
DVKSSET

SEQ ID NO: 196 - protein, 7 aa, synthetic construct
GSYDQGM

SEQ ID NO: 197 - protein, 7 aa, synthetic construct
GSNMATH

SEQ ID NO: 198 - protein, 7 aa, synthetic construct
NSGDNQP

SEQ ID NO: 199 - protein, 7 aa, synthetic construct
NRNNSDN

SEQ ID NO: 200 - protein, 7 aa, synthetic construct
QFASYAA

SEQ ID NO: 201 - protein, 7 aa, synthetic construct
TRFSGTV

SEQ ID NO: 202 - protein, 7 aa, synthetic construct
TRFSGTV

SEQ ID NO: 203 - protein, 7 aa, synthetic construct
DKNTATG

SEQ ID NO: 204 - protein, 7 aa, synthetic construct
QTTGGSL

SEQ ID NO: 205 - protein, 7 aa, synthetic construct
SLVGSGI

SEQ ID NO: 206 - protein, 7 aa, synthetic construct
GGSHVEM

SEQ ID NO: 207 - protein, 7 aa, synthetic construct
VPQAQAK

SEQ ID NO: 208 - protein, 7 aa, synthetic construct
ATRLSDG

SEQ ID NO: 209 - protein, 7 aa, synthetic construct
SGAMGGK

SEQ ID NO: 210 - protein, 7 aa, synthetic construct
SGVREGR

SEQ ID NO: 211 - protein, 7 aa, synthetic construct
GRLTETH

SEQ ID NO: 212 - protein, 7 aa, synthetic construct
SRVDVNR

SEQ ID NO: 213 - protein, 7 aa, synthetic construct
SESKQLS

SEQ ID NO: 214 - protein, 7 aa, synthetic construct
GRHNETT

SEQ ID NO: 215 - protein, 7 aa, synthetic construct
PVGVHIK

SEQ ID NO: 216 - protein, 7 aa, synthetic construct
RRSGLEM

SEQ ID NO: 217 - protein, 7 aa, synthetic construct
SQSFNSG

SEQ ID NO: 218 - protein, 7 aa, synthetic construct
VGASAAN

SEQ ID NO: 219 - protein, 7 aa, synthetic construct
NHNGGPP

SEQ ID NO: 220 - protein, 7 aa, synthetic construct
VIGMAVK

SEQ ID NO: 221 - protein, 7 aa, synthetic construct
HAMIHGV

SEQ ID NO: 222 - protein, 7 aa, synthetic construct
GNGTRSP

SEQ ID NO: 223 - protein, 7 aa, synthetic construct
RERADTT

SEQ ID NO: 224 - protein, 7 aa, synthetic construct
NRNTADN

SEQ ID NO: 225 - protein, 7 aa, synthetic construct
KVVSSDM

SEQ ID NO: 226 - protein, 7 aa, synthetic construct
NENEQRR

SEQ ID NO: 227 - protein, 7 aa, synthetic construct
SRSESLQ

SEQ ID NO: 228 - protein, 7 aa, synthetic construct
VDKSMVK

SEQ ID NO: 229 - protein, 7 aa, synthetic construct
GTLPIMA

SEQ ID NO: 230 - protein, 7 aa, synthetic construct
ELDATSK

SEQ ID NO: 231 - protein, 7 aa, synthetic construct
PTENSGV

SEQ ID NO: 232 - protein, 7 aa, synthetic construct
PQSINSG

SEQ ID NO: 233 - protein, 7 aa, synthetic construct
HGPPAIV

SEQ ID NO: 234 - protein, 7 aa, synthetic construct
SWGNIQT

SEQ ID NO: 235 - protein, 7 aa, synthetic construct
NDFRHVV

SEQ ID NO: 236 - protein, 7 aa, synthetic construct
MENGVKR

SEQ ID NO: 237 - protein, 7 aa, synthetic construct
GEMRSHV

SEQ ID NO: 238 - protein, 7 aa, synthetic construct
GYEDYQH

SEQ ID NO: 239 - protein, 7 aa, synthetic construct
SKSNGTL

SEQ ID NO: 240 - protein, 7 aa, synthetic construct
VLSPKIV

SEQ ID NO: 241 - protein, 7 aa, synthetic construct
GVSKTLL

SEQ ID NO: 242 - protein, 7 aa, synthetic construct
ASTGIKL

SEQ ID NO: 243 - protein, 7 aa, synthetic construct
GMTGLNM

SEQ ID NO: 244 - protein, 7 aa, synthetic construct
GVSARAQ

SEQ ID NO: 245 - protein, 7 aa, synthetic construct
QQGISSS

SEQ ID NO: 246 - protein, 7 aa, synthetic construct
PRNVIEG

SEQ ID NO: 247 - protein, 7 aa, synthetic construct
VFEAHSV

SEQ ID NO: 248 - protein, 7 aa, synthetic construct
SLLTGYI

SEQ ID NO: 249 - protein, 7 aa, synthetic construct
VSSGNGF

SEQ ID NO: 250 - protein, 7 aa, synthetic construct
SRGNIQS

SEQ ID NO: 251 - protein, 7 aa, synthetic construct
VDKSMMR

SEQ ID NO: 252 - protein, 7 aa, synthetic construct
MDTQHII

SEQ ID NO: 253 - protein, 7 aa, synthetic construct
GVLHIAS

SEQ ID NO: 254 - protein, 7 aa, synthetic construct
RTSYSDI

SEQ ID NO: 255 - protein, 7 aa, synthetic construct
NSVSHQY

SEQ ID NO: 256 - protein, 7 aa, synthetic construct
TLMHNSS

SEQ ID NO: 257 - protein, 7 aa, synthetic construct
TESRQAD

SEQ ID NO: 258 - protein, 7 aa, synthetic construct
SGSQDTT

SEQ ID NO: 259 - protein, 7 aa, synthetic construct
QVGSSTF

SEQ ID NO: 260 - protein, 7 aa, synthetic construct
PYDSPTS

SEQ ID NO: 261 - protein, 7 aa, synthetic construct
GITEKSY

SEQ ID NO: 262 - protein, 7 aa, synthetic construct
VTGMSVK

SEQ ID NO: 263 - protein, 7 aa, synthetic construct
VAYKSLS

SEQ ID NO: 264 - protein, 7 aa, synthetic construct
GIKEKNY

SEQ ID NO: 265 - protein, 7 aa, synthetic construct
PALRPQM

SEQ ID NO: 266 - protein, 7 aa, synthetic construct
ALTVGQK

SEQ ID NO: 267 - protein, 7 aa, synthetic construct
MRDQTAI

SEQ ID NO: 268 - protein, 7 aa, synthetic construct
GIQEKAH

SEQ ID NO: 269 - protein, 7 aa, synthetic construct
SGVSDGR

SEQ ID NO: 270 - protein, 7 aa, synthetic construct
DYLSRGV

SEQ ID NO: 271 - protein, 7 aa, synthetic construct
VIKDREL

SEQ ID NO: 272 - protein, 7 aa, synthetic construct
DVENPGK

SEQ ID NO: 273 - protein, 7 aa, synthetic construct
PTRGENL

SEQ ID NO: 274 - protein, 7 aa, synthetic construct
VLSPNIM

SEQ ID NO: 275 - protein, 7 aa, synthetic construct
VTIGNGY

SEQ ID NO: 276 - protein, 7 aa, synthetic construct
GYGLSGI

SEQ ID NO: 277 - protein, 7 aa, synthetic construct
GYEVNQH

SEQ ID NO: 278 - protein, 7 aa, synthetic construct
VKSYGAL

SEQ ID NO: 279 - protein, 7 aa, synthetic construct
KDTGSEV

SEQ ID NO: 280 - protein, 7 aa, synthetic construct
MMKTETG

SEQ ID NO: 281 - protein, 7 aa, synthetic construct
PFDSHTS

SEQ ID NO: 282 - protein, 7 aa, synthetic construct
QFRGMEM

SEQ ID NO: 283 - protein, 7 aa, synthetic construct
RLVQNED

SEQ ID NO: 284 - protein, 7 aa, synthetic construct
GIPWNTQ

SEQ ID NO: 285 - protein, 7 aa, synthetic construct
SRSESPQ

SEQ ID NO: 286 - protein, 7 aa, synthetic construct
GLHDQGM

SEQ ID NO: 287 - protein, 7 aa, synthetic construct
SVSLTKN

SEQ ID NO: 288 - protein, 7 aa, synthetic construct
RERFDTT

SEQ ID NO: 289 - protein, 7 aa, synthetic construct
LVHGNVA

SEQ ID NO: 290 - protein, 7 aa, synthetic construct
PVSSANL

SEQ ID NO: 291 - protein, 7 aa, synthetic construct
ARHSADG

SEQ ID NO: 292 - protein, 7 aa, synthetic construct
TGLSGKV

SEQ ID NO: 293 - protein, 7 aa, synthetic construct
DPITKNI

SEQ ID NO: 294 - protein, 7 aa, synthetic construct
QATGGSS

SEQ ID NO: 295 - protein, 7 aa, synthetic construct
MNQNNTQ

SEQ ID NO: 296 - protein, 7 aa, synthetic construct
NYDYSRT

SEQ ID NO: 297 - protein, 7 aa, synthetic construct
DLSRHTL

SEQ ID NO: 298 - protein, 7 aa, synthetic construct
MKETMKL

SEQ ID NO: 299 - protein, 7 aa, synthetic construct
EHDASIN

SEQ ID NO: 300 - protein, 7 aa, synthetic construct
EIVNGGR

SEQ ID NO: 301 - protein, 7 aa, synthetic construct
GTLPNTA

SEQ ID NO: 302 - protein, 7 aa, synthetic construct
GNEDNQH

SEQ ID NO: 303 - protein, 7 aa, synthetic construct
VRATGTH

SEQ ID NO: 304 - protein, 7 aa, synthetic construct
MISRVTT

SEQ ID NO: 305 - protein, 7 aa, synthetic construct
GERKGHE

SEQ ID NO: 306 - protein, 7 aa, synthetic construct
VIGAHSV

SEQ ID NO: 307 - protein, 7 aa, synthetic construct
TSSPPVN

SEQ ID NO: 308 - protein, 7 aa, synthetic construct
SNVDIKL

SEQ ID NO: 309 - protein, 7 aa, synthetic construct
AKYNETL

SEQ ID NO: 310 - protein, 7 aa, synthetic construct
GLGGTRD

SEQ ID NO: 311 - protein, 7 aa, synthetic construct
GESASVQ

SEQ ID NO: 312 - protein, 7 aa, synthetic construct
SRSESLQ

SEQ ID NO: 313 - protein, 7 aa, synthetic construct
SESKLLA

SEQ ID NO: 314 - protein, 7 aa, synthetic construct
NVVSSAM

SEQ ID NO: 315 - protein, 7 aa, synthetic construct
AKAPVTG

SEQ ID NO: 316 - protein, 7 aa, synthetic construct
DVEYPGK

SEQ ID NO: 317 - protein, 7 aa, synthetic construct
NHNGGLQ

SEQ ID NO: 318 - protein, 7 aa, synthetic construct
DVENPGN

SEQ ID NO: 319 - protein, 7 aa, synthetic construct
HVGSSTV

SEQ ID NO: 320 - protein, 7 aa, synthetic construct
KVVTSAM

SEQ ID NO: 321 - protein, 7 aa, synthetic construct
ERDGYKL

SEQ ID NO: 322 - protein, 7 aa, synthetic construct
SLVQNVI

SEQ ID NO: 323 - protein, 7 aa, synthetic construct
SGSQNTR

SEQ ID NO: 324 - protein, 7 aa, synthetic construct
GQARVPI

SEQ ID NO: 325 - protein, 7 aa, synthetic construct
AKAPENG

SEQ ID NO: 326 - protein, 7 aa, synthetic construct
SGLSVKV

SEQ ID NO: 327 - protein, 7 aa, synthetic construct
KAMDGII

SEQ ID NO: 328 - protein, 7 aa, synthetic construct
VVAVASS

SEQ ID NO: 329 - protein, 7 aa, synthetic construct
QRTTSGG

SEQ ID NO: 330 - protein, 7 aa, synthetic construct
VSATNSI

SEQ ID NO: 331 - protein, 7 aa, synthetic construct
KWTDNLE

SEQ ID NO: 332 - protein, 7 aa, synthetic construct
KDTQNLI

SEQ ID NO: 333 - protein, 7 aa, synthetic construct
KHIKDGT

SEQ ID NO: 334 - protein, 7 aa, synthetic construct
ARHSADG

SEQ ID NO: 335 - protein, 7 aa, synthetic construct
GYDHKSS

SEQ ID NO: 336 - protein, 7 aa, synthetic construct
HGSYGGE

SEQ ID NO: 337 - protein, 7 aa, synthetic construct
DYLSRGV

SEQ ID NO: 338 - protein, 7 aa, synthetic construct
VAYKSLS

SEQ ID NO: 339 - protein, 7 aa, synthetic construct
EKNYPLH

SEQ ID NO: 340 - protein, 7 aa, synthetic construct
MNSAKVP

SEQ ID NO: 341 - protein, 7 aa, synthetic construct
NIMINSV

SEQ ID NO: 342 - protein, 7 aa, synthetic construct
KKDVMNL

SEQ ID NO: 343 - protein, 7 aa, synthetic construct
KSDGVAG

SEQ ID NO: 344 - protein, 7 aa, synthetic construct
DFLSRGI

SEQ ID NO: 345 - protein, 7 aa, synthetic construct
GPAVKTS

SEQ ID NO: 346 - protein, 7 aa, synthetic construct
SVSLTRI

SEQ ID NO: 347 - protein, 7 aa, synthetic construct
ASSVGQK

SEQ ID NO: 348 - protein, 7 aa, synthetic construct
MENGADK

SEQ ID NO: 349 - protein, 7 aa, synthetic construct
TGKEIEL

SEQ ID NO: 350 - protein, 7 aa, synthetic construct
QTSSEAR

SEQ ID NO: 351 - protein, 7 aa, synthetic construct
ARHNETT

SEQ ID NO: 352 - protein, 7 aa, synthetic construct
LHYLSTA

SEQ ID NO: 353 - protein, 7 aa, synthetic construct
NAINRMV

SEQ ID NO: 354 - protein, 7 aa, synthetic construct
MNSTKVT

SEQ ID NO: 355 - protein, 7 aa, synthetic construct
GSLTETQ

SEQ ID NO: 356 - protein, 7 aa, synthetic construct
SMVKNVD

SEQ ID NO: 357 - protein, 7 aa, synthetic construct
VSYKALS

SEQ ID NO: 358 - protein, 7 aa, synthetic construct
MKEKMMF

SEQ ID NO: 359 - protein, 7 aa, synthetic construct
PRVDVNS

SEQ ID NO: 360 - protein, 7 aa, synthetic construct
KWTVNIE

SEQ ID NO: 361 - protein, 7 aa, synthetic construct
EQKGLLI

SEQ ID NO: 362 - protein, 7 aa, synthetic construct
HGQPAMV

SEQ ID NO: 363 - protein, 7 aa, synthetic construct
PYNVPSS

SEQ ID NO: 364 - protein, 7 aa, synthetic construct
ETLPNMA

SEQ ID NO: 365 - protein, 7 aa, synthetic construct
ALTGIKL

SEQ ID NO: 366 - protein, 7 aa, synthetic construct
RLGGTRE

SEQ ID NO: 367 - protein, 7 aa, synthetic construct
PGSYGGD

SEQ ID NO: 368 - protein, 7 aa, synthetic construct
QVGSPTV

SEQ ID NO: 369 - protein, 7 aa, synthetic construct
GERKFHE

SEQ ID NO: 370 - protein, 7 aa, synthetic construct
VIASYAD

SEQ ID NO: 371 - protein, 7 aa, synthetic construct
ARNESEG

SEQ ID NO: 372 - protein, 7 aa, synthetic construct
VIKDRVL

SEQ ID NO: 373 - protein, 7 aa, synthetic construct
GSLIETH

SEQ ID NO: 374 - protein, 7 aa, synthetic construct
MNSAKVP

SEQ ID NO: 375 - protein, 7 aa, synthetic construct
SGAMGAL

SEQ ID NO: 376 - protein, 7 aa, synthetic construct
QQGISSS

SEQ ID NO: 377 - protein, 7 aa, synthetic construct
GNKLQMD

SEQ ID NO: 378 - protein, 7 aa, synthetic construct
QLSTTSM

SEQ ID NO: 379 - protein, 7 aa, synthetic construct
SGLGNNS

SEQ ID NO: 380 - protein, 7 aa, synthetic construct
TSPNDSE

SEQ ID NO: 381 - protein, 7 aa, synthetic construct
LGTSRVS

SEQ ID NO: 382 - protein, 7 aa, synthetic construct
EIKPIQR

SEQ ID NO: 383 - protein, 7 aa, synthetic construct
LMNGITN

SEQ ID NO: 384 - protein, 7 aa, synthetic construct
ASPNNSE

SEQ ID NO: 385 - protein, 7 aa, synthetic construct
RIGMELA

SEQ ID NO: 386 - protein, 7 aa, synthetic construct
GLQLDVS

SEQ ID NO: 387 - protein, 7 aa, synthetic construct
VPQAQAK

SEQ ID NO: 388 - protein, 7 aa, synthetic construct
KDPRSAV

SEQ ID NO: 389 - protein, 7 aa, synthetic construct
KIGLISA

SEQ ID NO: 390 - protein, 7 aa, synthetic construct
GSNMATH

SEQ ID NO: 391 - protein, 7 aa, synthetic construct
GVSDMVQ

SEQ ID NO: 392 - protein, 7 aa, synthetic construct
AFGALKM

SEQ ID NO: 393 - protein, 7 aa, synthetic construct
NVLSSAM

SEQ ID NO: 394 - protein, 7 aa, synthetic construct
GNGTRNT

SEQ ID NO: 395 - protein, 7 aa, synthetic construct
LVDQNSV

SEQ ID NO: 396 - protein, 7 aa, synthetic construct
VNIGNGF

SEQ ID NO: 397 - protein, 7 aa, synthetic construct
VTKVDSV

SEQ ID NO: 398 - protein, 7 aa, synthetic construct
TKFSGTI

SEQ ID NO: 399 - protein, 7 aa, synthetic construct
DSKVRMD

SEQ ID NO: 400 - protein, 7 aa, synthetic construct
GMAIVQN

SEQ ID NO: 401 - protein, 7 aa, synthetic construct
PNNLPTS

SEQ ID NO: 402 - protein, 7 aa, synthetic construct
LRERDVY

SEQ ID NO: 403 - protein, 7 aa, synthetic construct
PPRSEVM

SEQ ID NO: 404 - protein, 7 aa, synthetic construct
GYGDNQH

SEQ ID NO: 405 - protein, 7 aa, synthetic construct
RRDDTIF

SEQ ID NO: 406 - protein, 7 aa, synthetic construct
AMNVIEG

SEQ ID NO: 407 - protein, 7 aa, synthetic construct
NNTEGTR

SEQ ID NO: 408 - protein, 7 aa, synthetic construct
MIQAPAM

SEQ ID NO: 409 - protein, 7 aa, synthetic construct
AAYKALS

SEQ ID NO: 410 - protein, 7 aa, synthetic construct
TEPAVSV

SEQ ID NO: 411 - protein, 7 aa, synthetic construct
PGSSKVS

SEQ ID NO: 412 - protein, 7 aa, synthetic construct
LTKGDSV

SEQ ID NO: 413 - protein, 7 aa, synthetic construct
GIMRTQM

SEQ ID NO: 414 - protein, 7 aa, synthetic construct
DKDGVAA

SEQ ID NO: 415 - protein, 7 aa, synthetic construct
SGLGNNS

SEQ ID NO: 416 - protein, 7 aa, synthetic construct
GMHNETT

SEQ ID NO: 417 - protein, 7 aa, synthetic construct
NENQQQR

SEQ ID NO: 418 - protein, 7 aa, synthetic construct
GLLSGLV

SEQ ID NO: 419 - protein, 7 aa, synthetic construct
KWTLNLE

SEQ ID NO: 420 - protein, 7 aa, synthetic construct
SMVQNVE

SEQ ID NO: 421 - protein, 7 aa, synthetic construct
AKYNGSL

SEQ ID NO: 422 - protein, 7 aa, synthetic construct
DKNEAKG

SEQ ID NO: 423 - protein, 7 aa, synthetic construct
QVLKNGA

SEQ ID NO: 424 - protein, 7 aa, synthetic construct
KAELNRV

SEQ ID NO: 425 - protein, 7 aa, synthetic construct
KKEPMMM

SEQ ID NO: 426 - protein, 7 aa, synthetic construct
HDKSTET

SEQ ID NO: 427 - protein, 7 aa, synthetic construct
TSRNNSE

SEQ ID NO: 428 - protein, 7 aa, synthetic construct
KSVSYQY

SEQ ID NO: 429 - protein, 7 aa, synthetic construct
PGLSHQM

SEQ ID NO: 430 - protein, 7 aa, synthetic construct
EKNPTVM

SEQ ID NO: 431 - protein, 7 aa, synthetic construct
LTKVDTV

SEQ ID NO: 432 - protein, 7 aa, synthetic construct
PQNTKID

SEQ ID NO: 433 - protein, 7 aa, synthetic construct
QGRGLIG

SEQ ID NO: 434 - protein, 7 aa, synthetic construct
AHERGLL

SEQ ID NO: 435 - protein, 7 aa, synthetic construct
RFEQVSN

SEQ ID NO: 436 - protein, 7 aa, synthetic construct
GSNLPTP

SEQ ID NO: 437 - protein, 7 aa, synthetic construct
ISEKISR

SEQ ID NO: 438 - protein, 7 aa, synthetic construct
SLVQNVV

SEQ ID NO: 439 - protein, 7 aa, synthetic construct
ATRLSAG

SEQ ID NO: 440 - protein, 7 aa, synthetic construct
SGVMGGL

SEQ ID NO: 441 - protein, 7 aa, synthetic construct
GFMSKIS

SEQ ID NO: 442 - protein, 7 aa, synthetic construct
TNQQVIM

SEQ ID NO: 443 - protein, 7 aa, synthetic construct
NREDYKQ

SEQ ID NO: 444 - protein, 7 aa, synthetic construct
GVYQDMR

SEQ ID NO: 445 - protein, 7 aa, synthetic construct
NENEQRR

SEQ ID NO: 446 - protein, 7 aa, synthetic construct
VAYKAPS

SEQ ID NO: 447 - protein, 7 aa, synthetic construct
GVSDRVH

SEQ ID NO: 448 - protein, 7 aa, synthetic construct
PTRGKNV

SEQ ID NO: 449 - protein, 7 aa, synthetic construct
TSPNNSV

SEQ ID NO: 450 - protein, 7 aa, synthetic construct
SRPESSQ

SEQ ID NO: 451 - protein, 7 aa, synthetic construct
SGAIGGL

SEQ ID NO: 452 - protein, 7 aa, synthetic construct
NIQRNTL

SEQ ID NO: 453 - protein, 7 aa, synthetic construct
KVTGGDY

SEQ ID NO: 454 - protein, 7 aa, synthetic construct
SLGTEFH

SEQ ID NO: 455 - protein, 7 aa, synthetic construct
KENGVDK

SEQ ID NO: 456 - protein, 7 aa, synthetic construct
RKDLLMG

SEQ ID NO: 457 - protein, 7 aa, synthetic construct
SESRPAD

SEQ ID NO: 458 - protein, 7 aa, synthetic construct
RIGMAQA

SEQ ID NO: 459 - protein, 7 aa, synthetic construct
LSKVRMD

SEQ ID NO: 460 - protein, 7 aa, synthetic construct
QVDSGPA

SEQ ID NO: 461 - protein, 7 aa, synthetic construct
ASQEQTR

SEQ ID NO: 462 - protein, 7 aa, synthetic construct
SLVQNVA

SEQ ID NO: 463 - protein, 7 aa, synthetic construct
RLVHTME

SEQ ID NO: 464 - protein, 7 aa, synthetic construct
GTNSEME

SEQ ID NO: 465 - protein, 7 aa, synthetic construct
GRAYAHN

SEQ ID NO: 466 - protein, 7 aa, synthetic construct
DVPVIRN

SEQ ID NO: 467 - protein, 7 aa, synthetic construct
QIGSSTV

SEQ ID NO: 468 - protein, 7 aa, synthetic construct
MKETLML

SEQ ID NO: 469 - protein, 7 aa, synthetic construct
ASQESSR

SEQ ID NO: 470 - protein, 7 aa, synthetic construct
LNVTGLT

SEQ ID NO: 471 - protein, 7 aa, synthetic construct
LLNGITN

SEQ ID NO: 472 - protein, 7 aa, synthetic construct
GLLQKMM

SEQ ID NO: 473 - protein, 7 aa, synthetic construct
TINPSSS

SEQ ID NO: 474 - protein, 7 aa, synthetic construct
GNEDNQQ

SEQ ID NO: 475 - protein, 7 aa, synthetic construct
LTKVDSA

SEQ ID NO: 476 - protein, 7 aa, synthetic construct
GSRAEDM

SEQ ID NO: 477 - protein, 7 aa, synthetic construct
AGERNQV

SEQ ID NO: 478 - protein, 7 aa, synthetic construct
RSPNNSE

SEQ ID NO: 479 - protein, 7 aa, synthetic construct
FINNLQM

SEQ ID NO: 480 - protein, 7 aa, synthetic construct
GVYQNMS

SEQ ID NO: 481 - protein, 7 aa, synthetic construct
MIEAPAV

SEQ ID NO: 482 - protein, 7 aa, synthetic construct
DYLSRGI

SEQ ID NO: 483 - protein, 7 aa, synthetic construct
GRHNETP

SEQ ID NO: 484 - protein, 7 aa, synthetic construct
QVGSSTA

SEQ ID NO: 485 - protein, 7 aa, synthetic construct
VIKDRVF

SEQ ID NO: 486 - protein, 7 aa, synthetic construct
PYNHPSS

SEQ ID NO: 487 - protein, 7 aa, synthetic construct
ANIEIAV

SEQ ID NO: 488 - protein, 7 aa, synthetic construct
EKSPAVM

SEQ ID NO: 489 - protein, 7 aa, synthetic construct
GGAGQND

SEQ ID NO: 490 - protein, 7 aa, synthetic construct
VKIYGAF

SEQ ID NO: 491 - protein, 7 aa, synthetic construct
SISDNSG

SEQ ID NO: 492 - protein, 7 aa, synthetic construct
QKSSDAR

SEQ ID NO: 493 - protein, 7 aa, synthetic construct
GLSQKMT

SEQ ID NO: 494 - protein, 7 aa, synthetic construct
NNSEGAR

SEQ ID NO: 495 - protein, 7 aa, synthetic construct
AKATETG

SEQ ID NO: 496 - protein, 7 aa, synthetic construct
ASLEPSR

SEQ ID NO: 497 - protein, 7 aa, synthetic construct
AATGIKL

SEQ ID NO: 498 - protein, 7 aa, synthetic construct
NREDNNH

SEQ ID NO: 499 - protein, 7 aa, synthetic construct
LTRGENV

SEQ ID NO: 500 - protein, 7 aa, synthetic construct
PTRLSEG

SEQ ID NO: 501 - protein, 7 aa, synthetic construct
NKNAATG

SEQ ID NO: 502 - protein, 7 aa, synthetic construct
NNSEGNR

SEQ ID NO: 503 - protein, 7 aa, synthetic construct
KSHQVIM

SEQ ID NO: 504 - protein, 7 aa, synthetic construct
GVENPGK

SEQ ID NO: 505 - protein, 7 aa, synthetic construct
SSKPATY

SEQ ID NO: 506 - protein, 7 aa, synthetic construct
EAKVYSL

SEQ ID NO: 507 - protein, 7 aa, synthetic construct
SQINTRE

SEQ ID NO: 508 - protein, 7 aa, synthetic construct
SLNGMVL

SEQ ID NO: 509 - protein, 7 aa, synthetic construct
PENNKID

SEQ ID NO: 510 - protein, 7 aa, synthetic construct
DVENPGQ

SEQ ID NO: 511 - protein, 7 aa, synthetic construct
ESEVKRE

SEQ ID NO: 512 - protein, 7 aa, synthetic construct
NGKGIEL

SEQ ID NO: 513 - protein, 7 aa, synthetic construct
GNMQTQN

SEQ ID NO: 514 - protein, 7 aa, synthetic construct
EIYNTAL

SEQ ID NO: 515 - protein, 7 aa, synthetic construct
TIHQVIV

SEQ ID NO: 516 - protein, 7 aa, synthetic construct
RAREEHM

SEQ ID NO: 517 - protein, 7 aa, synthetic construct
SDSKQLA

SEQ ID NO: 518 - protein, 7 aa, synthetic construct
GKQGEIP

SEQ ID NO: 519 - protein, 7 aa, synthetic construct
PGRETPT

SEQ ID NO: 520 - protein, 7 aa, synthetic construct
SGGNNSV

SEQ ID NO: 521 - protein, 7 aa, synthetic construct
RTSNSDV

SEQ ID NO: 522 - protein, 7 aa, synthetic construct
DISAKHE

SEQ ID NO: 523 - protein, 7 aa, synthetic construct
GYGSSGN

SEQ ID NO: 524 - protein, 7 aa, synthetic construct
NGQGVSV

SEQ ID NO: 525 - protein, 7 aa, synthetic construct
EKVVKES

SEQ ID NO: 526 - protein, 7 aa, synthetic construct
GTNSELV

SEQ ID NO: 527 - protein, 7 aa, synthetic construct
LRDGDTP

SEQ ID NO: 528 - protein, 7 aa, synthetic construct
ADERGQL

SEQ ID NO: 529 - protein, 7 aa, synthetic construct
PYNNPSS

SEQ ID NO: 530 - protein, 7 aa, synthetic construct
VGSERAI

SEQ ID NO: 531 - protein, 7 aa, synthetic construct
SVTAGRL

SEQ ID NO: 532 - protein, 7 aa, synthetic construct
NTSVGKS

SEQ ID NO: 533 - protein, 7 aa, synthetic construct
RTSNSNI

SEQ ID NO: 534 - protein, 7 aa, synthetic construct
YLKINNM

SEQ ID NO: 535 - protein, 7 aa, synthetic construct
KDPGSVV

SEQ ID NO: 536 - protein, 7 aa, synthetic construct
SMNGISN

SEQ ID NO: 537 - protein, 7 aa, synthetic construct
EKGPHNA

SEQ ID NO: 538 - protein, 7 aa, synthetic construct
GVDNPDR

SEQ ID NO: 539 - protein, 7 aa, synthetic construct
MSQKTSL

SEQ ID NO: 540 - protein, 7 aa, synthetic construct
MDTKHLI

SEQ ID NO: 541 - protein, 7 aa, synthetic construct
STIEVSV

SEQ ID NO: 542 - protein, 7 aa, synthetic construct
VVNHTEI

SEQ ID NO: 543 - protein, 7 aa, synthetic construct
PSVDVNR

SEQ ID NO: 544 - protein, 7 aa, synthetic construct
PDGVILI

SEQ ID NO: 545 - protein, 7 aa, synthetic construct
PEKTKID

SEQ ID NO: 546 - protein, 7 aa, synthetic construct
KKETIIL

SEQ ID NO: 547 - protein, 7 aa, synthetic construct
NRGAAYQ

SEQ ID NO: 548 - protein, 7 aa, synthetic construct
ASRIDTS

SEQ ID NO: 549 - protein, 7 aa, synthetic construct
GRHNEST

SEQ ID NO: 550 - protein, 7 aa, synthetic construct
VTIGNGL

SEQ ID NO: 551 - protein, 7 aa, synthetic construct
DNKAKHE

SEQ ID NO: 552 - protein, 7 aa, synthetic construct
VSNVRMD

SEQ ID NO: 553 - protein, 7 aa, synthetic construct
VHASAAN

SEQ ID NO: 554 - protein, 7 aa, synthetic construct
NDFGHVV

SEQ ID NO: 555 - protein, 7 aa, synthetic construct
GLSQKMM

SEQ ID NO: 556 - protein, 7 aa, synthetic construct
VSPNYQV

SEQ ID NO: 557 - protein, 7 aa, synthetic construct
NREDFNH

SEQ ID NO: 558 - protein, 7 aa, synthetic construct
RVAMEVQ

SEQ ID NO: 559 - protein, 7 aa, synthetic construct
KLGHNYE

SEQ ID NO: 560 - protein, 7 aa, synthetic construct
SGGSEGR

SEQ ID NO: 561 - protein, 7 aa, synthetic construct
RLGHNYD

SEQ ID NO: 562 - protein, 7 aa, synthetic construct
QRGVSSS

SEQ ID NO: 563 - protein, 7 aa, synthetic construct
ASQEPYS

SEQ ID NO: 564 - protein, 7 aa, synthetic construct
VKIYGAL

SEQ ID NO: 565 - protein, 7 aa, synthetic construct
VTIVNGI

SEQ ID NO: 566 - protein, 7 aa, synthetic construct
LVDQKSV

SEQ ID NO: 567 - protein, 7 aa, synthetic construct
QFASYAA

SEQ ID NO: 568 - protein, 7 aa, synthetic construct
QRSTSGV

SEQ ID NO: 569 - protein, 7 aa, synthetic construct
GYGLSGN

SEQ ID NO: 570 - protein, 7 aa, synthetic construct
VQKGHLI

SEQ ID NO: 571 - protein, 7 aa, synthetic construct
GLVQNVD

SEQ ID NO: 572 - protein, 7 aa, synthetic construct
RVDQNSV

SEQ ID NO: 573 - protein, 7 aa, synthetic construct
LHLTENR

SEQ ID NO: 574 - protein, 7 aa, synthetic construct
IAVATKS

SEQ ID NO: 575 - protein, 7 aa, synthetic construct
LHGLSTA

SEQ ID NO: 576 - protein, 7 aa, synthetic construct
SSKPATY

SEQ ID NO: 577 - protein, 7 aa, synthetic construct
YIAPAMS

SEQ ID NO: 578 - protein, 7 aa, synthetic construct
NHNGGTQ

SEQ ID NO: 579 - protein, 7 aa, synthetic construct
GLYDQGK

SEQ ID NO: 580 - protein, 7 aa, synthetic construct
GSLNNAT

SEQ ID NO: 581 - protein, 7 aa, synthetic construct
QIRAMEM

SEQ ID NO: 582 - protein, 7 aa, synthetic construct
TISPSSS

SEQ ID NO: 583 - protein, 7 aa, synthetic construct
RERDETT

SEQ ID NO: 584 - protein, 7 aa, synthetic construct
VKEQAER

SEQ ID NO: 585 - protein, 7 aa, synthetic construct
VLSPNNV

SEQ ID NO: 586 - protein, 7 aa, synthetic construct
AERGVTS

SEQ ID NO: 587 - protein, 7 aa, synthetic construct
VNEKAKS

SEQ ID NO: 588 - protein, 7 aa, synthetic construct
PGILTET

SEQ ID NO: 589 - protein, 7 aa, synthetic construct
VSATGTH

SEQ ID NO: 590 - protein, 7 aa, synthetic construct
PFDSPSR

SEQ ID NO: 591 - protein, 7 aa, synthetic construct
GERKVNE

SEQ ID NO: 592 - protein, 7 aa, synthetic construct
PARGENV

SEQ ID NO: 593 - protein, 7 aa, synthetic construct
ALSVGQQ

SEQ ID NO: 594 - protein, 7 aa, synthetic construct
GQARDPM

SEQ ID NO: 595 - protein, 7 aa, synthetic construct
SRSERTQ

SEQ ID NO: 596 - protein, 7 aa, synthetic construct
PGNEQSL

SEQ ID NO: 597 - protein, 7 aa, synthetic construct
SKSNEAL

SEQ ID NO: 598 - protein, 7 aa, synthetic construct
GLYDQGV

SEQ ID NO: 599 - protein, 7 aa, synthetic construct
SESRKAD

SEQ ID NO: 600 - protein, 7 aa, synthetic construct
QGPPAMV

SEQ ID NO: 601 - protein, 7 aa, synthetic construct
TGVRNQV

SEQ ID NO: 602 - protein, 7 aa, synthetic construct
DANKALS

SEQ ID NO: 603 - protein, 7 aa, synthetic construct
VTIGDGF

SEQ ID NO: 604 - protein, 7 aa, synthetic construct
KNEKMML

SEQ ID NO: 605 - protein, 7 aa, synthetic construct
KFGGGDF

SEQ ID NO: 606 - protein, 7 aa, synthetic construct
SEKTEVL

SEQ ID NO: 607 - protein, 7 aa, synthetic construct
GSVEHMK

SEQ ID NO: 608 - protein, 7 aa, synthetic construct
PLVAVGV

SEQ ID NO: 609 - protein, 7 aa, synthetic construct
RESKQMA

SEQ ID NO: 610 - protein, 7 aa, synthetic construct
SDSKQLA

SEQ ID NO: 611 - protein, 7 aa, synthetic construct
NVSLSGI

SEQ ID NO: 612 - protein, 7 aa, synthetic construct
LVIHTEI

SEQ ID NO: 613 - protein, 7 aa, synthetic construct
LVKDATQ

SEQ ID NO: 614 - protein, 7 aa, synthetic construct
ERDGIKL

SEQ ID NO: 615 - protein, 7 aa, synthetic construct
KDPGSVV

SEQ ID NO: 616 - protein, 7 aa, synthetic construct
PEKTKID

SEQ ID NO: 617 - protein, 7 aa, synthetic construct
LRGGDTP

SEQ ID NO: 618 - protein, 7 aa, synthetic construct
GLMSKIP

SEQ ID NO: 619 - protein, 7 aa, synthetic construct
VVSNGWP

SEQ ID NO: 620 - protein, 7 aa, synthetic construct
AKRISEG

SEQ ID NO: 621 - protein, 7 aa, synthetic construct
TYNHPSS

SEQ ID NO: 622 - protein, 7 aa, synthetic construct
PGTSKVN

SEQ ID NO: 623 - protein, 7 aa, synthetic construct
DYMSRGI

SEQ ID NO: 624 - protein, 7 aa, synthetic construct
VRASGTH

SEQ ID NO: 625 - protein, 7 aa, synthetic construct
RTSNSDN

SEQ ID NO: 626 - protein, 7 aa, synthetic construct
GMQGVRN

SEQ ID NO: 627 - protein, 7 aa, synthetic construct
SDSRQAD

SEQ ID NO: 628 - protein, 7 aa, synthetic construct
RKELLDG

SEQ ID NO: 629 - protein, 7 aa, synthetic construct
GSVEHMM

SEQ ID NO: 630 - protein, 7 aa, synthetic construct
DVENAGK

SEQ ID NO: 631 - protein, 7 aa, synthetic construct
KDPGSAV

SEQ ID NO: 632 - protein, 7 aa, synthetic construct
GEYQNMR

SEQ ID NO: 633 - protein, 7 aa, synthetic construct
NNSDGTR

SEQ ID NO: 634 - protein, 7 aa, synthetic construct
GQARVPL

SEQ ID NO: 635 - protein, 7 aa, synthetic construct
DKIYGAL

SEQ ID NO: 636 - protein, 7 aa, synthetic construct
LGKDVTQ

SEQ ID NO: 637 - protein, 7 aa, synthetic construct
VFESYAD

SEQ ID NO: 638 - protein, 7 aa, synthetic construct
RSSTTPT

SEQ ID NO: 639 - protein, 7 aa, synthetic construct
KDEMNRV

SEQ ID NO: 640 - protein, 7 aa, synthetic construct
SALSGKV

SEQ ID NO: 641 - protein, 7 aa, synthetic construct
SESNKLA

SEQ ID NO: 642 - protein, 7 aa, synthetic construct
GRMNNAT

SEQ ID NO: 643 - protein, 7 aa, synthetic construct
PRVDVNL

SEQ ID NO: 644 - protein, 7 aa, synthetic construct
SGVSGKV

SEQ ID NO: 645 - protein, 7 aa, synthetic construct
GGDNADR

SEQ ID NO: 646 - protein, 7 aa, synthetic construct
PVGVHIG

SEQ ID NO: 647 - protein, 7 aa, synthetic construct
LTDTKLT

SEQ ID NO: 648 - protein, 7 aa, synthetic construct
VTVGNGF

SEQ ID NO: 649 - protein, 7 aa, synthetic construct
LVDQNSL

SEQ ID NO: 650 - protein, 7 aa, synthetic construct
LNFSTLV

SEQ ID NO: 651 - protein, 7 aa, synthetic construct
PKPETVM

SEQ ID NO: 652 - protein, 7 aa, synthetic construct
ADGVSKM

SEQ ID NO: 653 - protein, 7 aa, synthetic construct
ALGVGQK

SEQ ID NO: 654 - protein, 7 aa, synthetic construct
GDAGQKD

SEQ ID NO: 655 - protein, 7 aa, synthetic construct
VISAKKE

SEQ ID NO: 656 - protein, 7 aa, synthetic construct
NRIDSAT

SEQ ID NO: 657 - protein, 7 aa, synthetic construct
QVGSSTF

SEQ ID NO: 658 - protein, 7 aa, synthetic construct
EVNIKMS

SEQ ID NO: 659 - protein, 7 aa, synthetic construct
DVENRGK

SEQ ID NO: 660 - protein, 7 aa, synthetic construct
AKQGEIQ

SEQ ID NO: 661 - protein, 7 aa, synthetic construct
PPYSENS

SEQ ID NO: 662 - protein, 7 aa, synthetic construct
VFGNTIG

SEQ ID NO: 663 - protein, 7 aa, synthetic construct
SLSLQMK

SEQ ID NO: 664 - protein, 7 aa, synthetic construct
GPAVKTY

SEQ ID NO: 665 - protein, 7 aa, synthetic construct
MIGLSSA

SEQ ID NO: 666 - protein, 7 aa, synthetic construct
DEGATPK

SEQ ID NO: 667 - protein, 7 aa, synthetic construct
GLRADDM

SEQ ID NO: 668 - protein, 7 aa, synthetic construct
TLNQVIM

SEQ ID NO: 669 - protein, 7 aa, synthetic construct
RSLTTQT

SEQ ID NO: 670 - protein, 7 aa, synthetic construct
NILINTV

SEQ ID NO: 671 - protein, 7 aa, synthetic construct
GVNKTLH

SEQ ID NO: 672 - protein, 7 aa, synthetic construct
NGQGVYV

SEQ ID NO: 673 - protein, 7 aa, synthetic construct
DKNAATA

SEQ ID NO: 674 - protein, 7 aa, synthetic construct
DKNAAMG

SEQ ID NO: 675 - protein, 7 aa, synthetic construct
NRNTSHN

SEQ ID NO: 676 - protein, 7 aa, synthetic construct
PTRSENV

SEQ ID NO: 677 - protein, 7 aa, synthetic construct
VISAKLQ

SEQ ID NO: 678 - protein, 7 aa, synthetic construct
RNAPNMD

SEQ ID NO: 679 - protein, 7 aa, synthetic construct
APSGIKL

SEQ ID NO: 680 - protein, 7 aa, synthetic construct
DHDASSN

SEQ ID NO: 681 - protein, 7 aa, synthetic construct
RLTRDDT

SEQ ID NO: 682 - protein, 7 aa, synthetic construct
VFASHAA

SEQ ID NO: 683 - protein, 7 aa, synthetic construct
LHHATKE

SEQ ID NO: 684 - protein, 7 aa, synthetic construct
GPAGKTN

SEQ ID NO: 685 - protein, 7 aa, synthetic construct
PGSSANL

SEQ ID NO: 686 - protein, 7 aa, synthetic construct
SGAMGGS

SEQ ID NO: 687 - protein, 7 aa, synthetic construct
TGLSGKV

SEQ ID NO: 688 - protein, 7 aa, synthetic construct
LRVGSGI

SEQ ID NO: 689 - protein, 7 aa, synthetic construct
GMQGGRI

SEQ ID NO: 690 - protein, 7 aa, synthetic construct
GVNSDLQ

SEQ ID NO: 691 - protein, 7 aa, synthetic construct
RNQNDTQ

SEQ ID NO: 692 - protein, 7 aa, synthetic construct
HLVAVGV

SEQ ID NO: 693 - protein, 7 aa, synthetic construct
KQIKDAT

SEQ ID NO: 694 - protein, 7 aa, synthetic construct
RENAVPP

SEQ ID NO: 695 - protein, 7 aa, synthetic construct
GHANSNM

SEQ ID NO: 696 - protein, 7 aa, synthetic construct
PGSYGGG

SEQ ID NO: 697 - protein, 7 aa, synthetic construct
MHDLSTA

SEQ ID NO: 698 - protein, 7 aa, synthetic construct
GNGTHNP

SEQ ID NO: 699 - protein, 7 aa, synthetic construct
AVGLSKM

SEQ ID NO: 700 - protein, 7 aa, synthetic construct
GLSQKMT

SEQ ID NO: 701 - protein, 7 aa, synthetic construct
ETGKAVK

SEQ ID NO: 702 - protein, 7 aa, synthetic construct
NVKSSET

SEQ ID NO: 703 - protein, 7 aa, synthetic construct
TSPNNTE

SEQ ID NO: 704 - protein, 7 aa, synthetic construct
EPGVKRE

SEQ ID NO: 705 - protein, 7 aa, synthetic construct
GTLPKMA

SEQ ID NO: 706 - protein, 7 aa, synthetic construct
YESRQAD

SEQ ID NO: 707 - protein, 7 aa, synthetic construct
EREGNKL

SEQ ID NO: 708 - protein, 7 aa, synthetic construct
VQARVPM

SEQ ID NO: 709 - protein, 7 aa, synthetic construct
STRGENV

SEQ ID NO: 710 - protein, 7 aa, synthetic construct
DQLKMRV

SEQ ID NO: 711 - protein, 7 aa, synthetic construct
GVHQNMR

SEQ ID NO: 712 - protein, 7 aa, synthetic construct
KKPPSDH

SEQ ID NO: 713 - protein, 7 aa, synthetic construct
AVTARVQ

SEQ ID NO: 714 - protein, 7 aa, synthetic construct
VGSESAT

SEQ ID NO: 715 - protein, 7 aa, synthetic construct
VVPGLYT

SEQ ID NO: 716 - protein, 7 aa, synthetic construct
NHSGGPQ

SEQ ID NO: 717 - protein, 7 aa, synthetic construct
PPRSGFM

SEQ ID NO: 718 - protein, 7 aa, synthetic construct
PVGDHIE

SEQ ID NO: 719 - protein, 7 aa, synthetic construct
PKPEAVL

SEQ ID NO: 720 - protein, 7 aa, synthetic construct
AKAPQTG

SEQ ID NO: 721 - protein, 7 aa, synthetic construct
PNNLPRS

SEQ ID NO: 722 - protein, 7 aa, synthetic construct
QVGSSYV

SEQ ID NO: 723 - protein, 7 aa, synthetic construct
RHDNSNM

SEQ ID NO: 724 - protein, 7 aa, synthetic construct
RLYDQGM

SEQ ID NO: 725 - protein, 7 aa, synthetic construct
PIHQVIK

SEQ ID NO: 726 - protein, 7 aa, synthetic construct
APSGIKL

SEQ ID NO: 727 - protein, 7 aa, synthetic construct
ENASYAA

SEQ ID NO: 728 - protein, 7 aa, synthetic construct
TITPSSS

SEQ ID NO: 729 - protein, 7 aa, synthetic construct
GGSGQKD

SEQ ID NO: 730 - protein, 7 aa, synthetic construct
RDRVILI

SEQ ID NO: 731 - protein, 7 aa, synthetic construct
MGLINRQ

SEQ ID NO: 732 - protein, 7 aa, synthetic construct
LVDRNSV

SEQ ID NO: 733 - protein, 7 aa, synthetic construct
GLRLNVS

SEQ ID NO: 734 - protein, 7 aa, synthetic construct
ESGVKQE

SEQ ID NO: 735 - protein, 7 aa, synthetic construct
RQSVNSG

SEQ ID NO: 736 - protein, 7 aa, synthetic construct
VERAVTS

SEQ ID NO: 737 - protein, 7 aa, synthetic construct
VFASYDD

SEQ ID NO: 738 - protein, 7 aa, synthetic construct
KDPVSAV

SEQ ID NO: 739 - protein, 7 aa, synthetic construct
GSASAHN

SEQ ID NO: 740 - protein, 7 aa, synthetic construct
SRSESTQ

SEQ ID NO: 741 - protein, 7 aa, synthetic construct
LISAKLE

SEQ ID NO: 742 - protein, 7 aa, synthetic construct
QISGIEM

SEQ ID NO: 743 - protein, 7 aa, synthetic construct
SSEKISR

SEQ ID NO: 744 - protein, 7 aa, synthetic construct
GNGTSNP

SEQ ID NO: 745 - protein, 7 aa, synthetic construct
VKVYGAL

SEQ ID NO: 746 - protein, 7 aa, synthetic construct
DVENRGK

SEQ ID NO: 747 - protein, 7 aa, synthetic construct
TTERTAT

SEQ ID NO: 748 - protein, 7 aa, synthetic construct
SEKTDGL

SEQ ID NO: 749 - protein, 7 aa, synthetic construct
TIERTST

SEQ ID NO: 750 - protein, 7 aa, synthetic construct
PNLLHSQ

SEQ ID NO: 751 - protein, 7 aa, synthetic construct
VMKIETG

SEQ ID NO: 752 - protein, 7 aa, synthetic construct
TQGAESL

SEQ ID NO: 753 - protein, 7 aa, synthetic construct
MLLRTDE

SEQ ID NO: 754 - protein, 7 aa, synthetic construct
GMYSVSV

SEQ ID NO: 755 - protein, 7 aa, synthetic construct
VISQKPI

SEQ ID NO: 756 - protein, 7 aa, synthetic construct
VFGAHNV

SEQ ID NO: 757 - protein, 7 aa, synthetic construct
TDPKIQK

SEQ ID NO: 758 - protein, 7 aa, synthetic construct
MNITKVP

SEQ ID NO: 759 - protein, 7 aa, synthetic construct
KNDTFKV

SEQ ID NO: 760 - protein, 7 aa, synthetic construct
LVDQISV

SEQ ID NO: 761 - protein, 7 aa, synthetic construct
RNGMALA

SEQ ID NO: 762 - protein, 7 aa, synthetic construct
NKNEQQR

SEQ ID NO: 763 - protein, 7 aa, synthetic construct
AWSVGQK

SEQ ID NO: 764 - protein, 7 aa, synthetic construct
PPRAEFM

SEQ ID NO: 765 - protein, 7 aa, synthetic construct
NHNGRPQ

SEQ ID NO: 766 - protein, 7 aa, synthetic construct
PMVVVER

SEQ ID NO: 767 - protein, 7 aa, synthetic construct
SGESVRA

SEQ ID NO: 768 - protein, 7 aa, synthetic construct
LINRVTT

SEQ ID NO: 769 - protein, 7 aa, synthetic construct
RERVDTI

SEQ ID NO: 770 - protein, 7 aa, synthetic construct
HLGYESS

SEQ ID NO: 771 - protein, 7 aa, synthetic construct
RKETQGD

SEQ ID NO: 772 - protein, 7 aa, synthetic construct
RHANSDM

SEQ ID NO: 773 - protein, 7 aa, synthetic construct
ANNESAV

SEQ ID NO: 774 - protein, 7 aa, synthetic construct
TMSSADG

SEQ ID NO: 775 - protein, 7 aa, synthetic construct
LFGAHSV

SEQ ID NO: 776 - protein, 7 aa, synthetic construct
PYNLTTS

SEQ ID NO: 777 - protein, 7 aa, synthetic construct
MINRVTA

SEQ ID NO: 778 - protein, 7 aa, synthetic construct
GERKVHA

SEQ ID NO: 779 - protein, 7 aa, synthetic construct
VNHGGGQ

SEQ ID NO: 780 - protein, 7 aa, synthetic construct
VGATKSI

SEQ ID NO: 781 - protein, 7 aa, synthetic construct
VIATKSI

SEQ ID NO: 782 - protein, 7 aa, synthetic construct
PTWGENV

SEQ ID NO: 783 - protein, 7 aa, synthetic construct
GEMRSVV

SEQ ID NO: 784 - protein, 7 aa, synthetic construct
KSDSHQY

SEQ ID NO: 785 - protein, 7 aa, synthetic construct
QVMGTLN

SEQ ID NO: 786 - protein, 7 aa, synthetic construct
EIYNTAQ

SEQ ID NO: 787 - protein, 7 aa, synthetic construct
KIHQDIM

SEQ ID NO: 788 - protein, 7 aa, synthetic construct
SSKPGSY

SEQ ID NO: 789 - protein, 7 aa, synthetic construct
ARNVIES

SEQ ID NO: 790 - protein, 7 aa, synthetic construct
GYDHKSS

SEQ ID NO: 791 - protein, 7 aa, synthetic construct
VISAKLV

SEQ ID NO: 792 - protein, 7 aa, synthetic construct
KIDTIKL

SEQ ID NO: 793 - protein, 7 aa, synthetic construct
NRSTSDN

SEQ ID NO: 794 - protein, 7 aa, synthetic construct
NHNGGRQ

SEQ ID NO: 795 - protein, 7 aa, synthetic construct
LVKDATQ

SEQ ID NO: 796 - protein, 7 aa, synthetic construct
PRVDFNR

SEQ ID NO: 797 - protein, 7 aa, synthetic construct
GPAAKTN

SEQ ID NO: 798 - protein, 7 aa, synthetic construct
GLKLNVS

SEQ ID NO: 799 - protein, 7 aa, synthetic construct
SPTGIKL

SEQ ID NO: 800 - protein, 7 aa, synthetic construct
NGQGVSG

SEQ ID NO: 801 - protein, 7 aa, synthetic construct
PTRGEDV

SEQ ID NO: 802 - protein, 7 aa, synthetic construct
GNVLKSS

SEQ ID NO: 803 - protein, 7 aa, synthetic construct
RSVSHQY

SEQ ID NO: 804 - protein, 7 aa, synthetic construct
EMTGLRE

SEQ ID NO: 805 - protein, 7 aa, synthetic construct
ADGFSKM

SEQ ID NO: 806 - protein, 7 aa, synthetic construct
DVKSDTE

SEQ ID NO: 807 - protein, 7 aa, synthetic construct
LIPSVDV

SEQ ID NO: 808 - protein, 7 aa, synthetic construct
GYVIKSS

SEQ ID NO: 809 - protein, 7 aa, synthetic construct
PYNLHSY

SEQ ID NO: 810 - protein, 7 aa, synthetic construct
GRHNETS

SEQ ID NO: 811 - protein, 7 aa, synthetic construct
NMNTSDN

SEQ ID NO: 812 - protein, 7 aa, synthetic construct
PGKGQSL

SEQ ID NO: 813 - protein, 7 aa, synthetic construct
VIMQTQN

SEQ ID NO: 814 - protein, 7 aa, synthetic construct
NQTGSRG

SEQ ID NO: 815 - protein, 7 aa, synthetic construct
HVQRMTM

SEQ ID NO: 816 - protein, 7 aa, synthetic construct
GLRGEDM

SEQ ID NO: 817 - protein, 7 aa, synthetic construct
ATRQSMT

SEQ ID NO: 818 - protein, 7 aa, synthetic construct
DKEMRAL

SEQ ID NO: 819 - protein, 7 aa, synthetic construct
PNILQSQ

SEQ ID NO: 820 - protein, 7 aa, synthetic construct
MFGGRDF

SEQ ID NO: 821 - protein, 7 aa, synthetic construct
SLLPGNL

SEQ ID NO: 822 - protein, 7 aa, synthetic construct
RNAPNMG

SEQ ID NO: 823 - protein, 7 aa, synthetic construct
IKETMKL

SEQ ID NO: 824 - protein, 7 aa, synthetic construct
GEYQNMR

SEQ ID NO: 825 - protein, 7 aa, synthetic construct
KDSGSAV

SEQ ID NO: 826 - protein, 7 aa, synthetic construct
IDRFDRS

SEQ ID NO: 827 - protein, 7 aa, synthetic construct
HDKSSEN

SEQ ID NO: 828 - protein, 7 aa, synthetic construct
NGQGGSV

SEQ ID NO: 829 - protein, 7 aa, synthetic construct
MGSINQQ

SEQ ID NO: 830 - protein, 7 aa, synthetic construct
SKSNETP

SEQ ID NO: 831 - protein, 7 aa, synthetic construct
EKVEKVS

SEQ ID NO: 832 - protein, 7 aa, synthetic construct
GIMQTHN

SEQ ID NO: 833 - protein, 7 aa, synthetic construct
GYGLSGS

SEQ ID NO: 834 - protein, 7 aa, synthetic construct
GLMTKIS

SEQ ID NO: 835 - protein, 7 aa, synthetic construct
GKAIVEN

SEQ ID NO: 836 - protein, 7 aa, synthetic construct
KNHQVIM

SEQ ID NO: 837 - protein, 7 aa, synthetic construct
SVSLTKT

SEQ ID NO: 838 - protein, 7 aa, synthetic construct
NHNGGLS

SEQ ID NO: 839 - protein, 7 aa, synthetic construct
GYEGNQH

SEQ ID NO: 840 - protein, 7 aa, synthetic construct
VTIGNGY

SEQ ID NO: 841 - protein, 7 aa, synthetic construct
NGKGIEL

SEQ ID NO: 842 - protein, 7 aa, synthetic construct
SMNGILI

SEQ ID NO: 843 - protein, 7 aa, synthetic construct
GISSNTQ

SEQ ID NO: 844 - protein, 7 aa, synthetic construct
LSLKTSL

SEQ ID NO: 845 - protein, 7 aa, synthetic construct
QQGVPSS

SEQ ID NO: 846 - protein, 7 aa, synthetic construct
NIQRNQL

SEQ ID NO: 847 - protein, 7 aa, synthetic construct
SMNGITS

SEQ ID NO: 848 - protein, 7 aa, synthetic construct
RNQNNSQ

SEQ ID NO: 849 - protein, 7 aa, synthetic construct
TSPNNSQ

SEQ ID NO: 850 - protein, 7 aa, synthetic construct
GVNSALR

SEQ ID NO: 851 - protein, 7 aa, synthetic construct
VFRAHSV

SEQ ID NO: 852 - protein, 7 aa, synthetic construct
LRVGSGI

SEQ ID NO: 853 - protein, 7 aa, synthetic construct
TNHKLIM

SEQ ID NO: 854 - protein, 7 aa, synthetic construct
SESRQAH

SEQ ID NO: 855 - protein, 7 aa, synthetic construct
SKSNGTL

SEQ ID NO: 856 - protein, 7 aa, synthetic construct
DKNAATA

SEQ ID NO: 857 - protein, 7 aa, synthetic construct
GLPQKMM

SEQ ID NO: 858 - protein, 7 aa, synthetic construct
GTIGNGF

SEQ ID NO: 859 - protein, 7 aa, synthetic construct
VDRTRDE

SEQ ID NO: 860 - protein, 7 aa, synthetic construct
TGKGSEL

SEQ ID NO: 861 - protein, 7 aa, synthetic construct
GLTPFGR

SEQ ID NO: 862 - protein, 7 aa, synthetic construct
LVKNGII

SEQ ID NO: 863 - protein, 7 aa, synthetic construct
GQAPVPM

SEQ ID NO: 864 - protein, 7 aa, synthetic construct
KDRYDND

SEQ ID NO: 865 - protein, 7 aa, synthetic construct
SKAPETG

SEQ ID NO: 866 - protein, 7 aa, synthetic construct
IDRSERS

SEQ ID NO: 867 - protein, 7 aa, synthetic construct
VRISDHI

SEQ ID NO: 868 - protein, 7 aa, synthetic construct
PPRGENV

SEQ ID NO: 869 - protein, 7 aa, synthetic construct
KIDTFKG

SEQ ID NO: 870 - protein, 7 aa, synthetic construct
GVNNTLL

SEQ ID NO: 871 - protein, 7 aa, synthetic construct
SLVQNVV

SEQ ID NO: 872 - protein, 7 aa, synthetic construct
MVKIETG

SEQ ID NO: 873 - protein, 7 aa, synthetic construct
ENMAKHE

SEQ ID NO: 874 - protein, 7 aa, synthetic construct
SMVKNVD

SEQ ID NO: 875 - protein, 7 aa, synthetic construct
VNNGGEK

SEQ ID NO: 876 - protein, 7 aa, synthetic construct
SQIIKRE

SEQ ID NO: 877 - protein, 7 aa, synthetic construct
SYLTQVI

SEQ ID NO: 878 - protein, 7 aa, synthetic construct
VNHGGEQ

SEQ ID NO: 879 - protein, 7 aa, synthetic construct
LLVGTGI

SEQ ID NO: 880 - protein, 7 aa, synthetic construct
VFQREHV

SEQ ID NO: 881 - protein, 7 aa, synthetic construct
SLSLQMK

SEQ ID NO: 882 - protein, 7 aa, synthetic construct
EVNIKMT

SEQ ID NO: 883 - protein, 7 aa, synthetic construct
RSLTTQT

SEQ ID NO: 884 - protein, 7 aa, synthetic construct
MRNQTAI

SEQ ID NO: 885 - protein, 7 aa, synthetic construct
RVAQEVQ

SEQ ID NO: 886 - protein, 7 aa, synthetic construct
LVLQSST

SEQ ID NO: 887 - protein, 7 aa, synthetic construct
AFGVLNM

SEQ ID NO: 888 - protein, 7 aa, synthetic construct
NLVAVGV

SEQ ID NO: 889 - protein, 7 aa, synthetic construct
TTPKNSE

SEQ ID NO: 890 - protein, 7 aa, synthetic construct
ISVGTKS

SEQ ID NO: 891 - protein, 7 aa, synthetic construct
GLLGNIS

SEQ ID NO: 892 - protein, 7 aa, synthetic construct
KINQVII

SEQ ID NO: 893 - protein, 7 aa, synthetic construct
VKHGGEQ

SEQ ID NO: 894 - protein, 7 aa, synthetic construct
PSDSPSS

SEQ ID NO: 895 - protein, 7 aa, synthetic construct
VTATKSI

SEQ ID NO: 896 - protein, 7 aa, synthetic construct
IDGIDPS

SEQ ID NO: 897 - protein, 7 aa, synthetic construct
RLNHMDT

SEQ ID NO: 898 - protein, 7 aa, synthetic construct
RSPNNSE

SEQ ID NO: 899 - protein, 7 aa, synthetic construct
GNEQAER

SEQ ID NO: 900 - protein, 7 aa, synthetic construct
RVALDVQ

SEQ ID NO: 901 - protein, 7 aa, synthetic construct
ARVDVNR

SEQ ID NO: 902 - protein, 7 aa, synthetic construct
TEPGVSG

SEQ ID NO: 903 - protein, 7 aa, synthetic construct
GSKLATP

SEQ ID NO: 904 - protein, 7 aa, synthetic construct
NRVTAYQ

SEQ ID NO: 905 - protein, 7 aa, synthetic construct
LSNSPRS

SEQ ID NO: 906 - protein, 7 aa, synthetic construct
LDKSQRG

SEQ ID NO: 907 - protein, 7 aa, synthetic construct
TISHVSN

SEQ ID NO: 908 - protein, 7 aa, synthetic construct
GLRSEDM

SEQ ID NO: 909 - protein, 7 aa, synthetic construct
YLKNNNV

SEQ ID NO: 910 - protein, 7 aa, synthetic construct
GGFHVEV

SEQ ID NO: 911 - protein, 7 aa, synthetic construct
MKDTKML

SEQ ID NO: 912 - protein, 7 aa, synthetic construct
NIERTAT

SEQ ID NO: 913 - protein, 7 aa, synthetic construct
AKAPETA

SEQ ID NO: 914 - protein, 7 aa, synthetic construct
RGKEVGN

SEQ ID NO: 915 - protein, 7 aa, synthetic construct
DVGNPGK

SEQ ID NO: 916 - protein, 7 aa, synthetic construct
PPRSEFK

SEQ ID NO: 917 - protein, 7 aa, synthetic construct
AQMNVHS

SEQ ID NO: 918 - protein, 7 aa, synthetic construct
RLRAEDM

SEQ ID NO: 919 - protein, 7 aa, synthetic construct
MNGITPH

SEQ ID NO: 920 - protein, 7 aa, synthetic construct
TAIGQSN

SEQ ID NO: 921 - protein, 7 aa, synthetic construct
GVYQNVR

SEQ ID NO: 922 - protein, 7 aa, synthetic construct
SYYASKT

SEQ ID NO: 923 - protein, 7 aa, synthetic construct
ATRQSEG

SEQ ID NO: 924 - protein, 7 aa, synthetic construct
SQGAKSL

SEQ ID NO: 925 - protein, 7 aa, synthetic construct
GYVIKSS

SEQ ID NO: 926 - protein, 7 aa, synthetic construct
NVASSAM

SEQ ID NO: 927 - protein, 7 aa, synthetic construct
PLGTDFH

SEQ ID NO: 928 - protein, 7 aa, synthetic construct
GNVLKSS

SEQ ID NO: 929 - protein, 7 aa, synthetic construct
TIDKVIM

SEQ ID NO: 930 - protein, 7 aa, synthetic construct
VLHGNVA

SEQ ID NO: 931 - protein, 7 aa, synthetic construct
LHYLSTA

SEQ ID NO: 932 - protein, 7 aa, synthetic construct
PPRSEIM

SEQ ID NO: 933 - protein, 7 aa, synthetic construct
PVRSANL

SEQ ID NO: 934 - protein, 7 aa, synthetic construct
DQISKNI

SEQ ID NO: 935 - protein, 7 aa, synthetic construct
HVVAVGV

SEQ ID NO: 936 - protein, 7 aa, synthetic construct
FVDQNSV

SEQ ID NO: 937 - protein, 7 aa, synthetic construct
KYYESTI

SEQ ID NO: 938 - protein, 7 aa, synthetic construct
KIHQDNM

SEQ ID NO: 939 - protein, 7 aa, synthetic construct
NNSEGSR

SEQ ID NO: 940 - protein, 7 aa, synthetic construct
ILNGMVL

SEQ ID NO: 941 - protein, 7 aa, synthetic construct
NAVGTKT

SEQ ID NO: 942 - protein, 7 aa, synthetic construct
DKNESTG

SEQ ID NO: 943 - protein, 7 aa, synthetic construct
DVIKRLG

SEQ ID NO: 944 - protein, 7 aa, synthetic construct
LVNAVPP

SEQ ID NO: 945 - protein, 7 aa, synthetic construct
WKETQGI

SEQ ID NO: 946 - protein, 7 aa, synthetic construct
SIVDRTL

SEQ ID NO: 947 - protein, 7 aa, synthetic construct
HLVSVGV

SEQ ID NO: 948 - protein, 7 aa, synthetic construct
AYNLPSS

SEQ ID NO: 949 - protein, 7 aa, synthetic construct
SIHQVIM

SEQ ID NO: 950 - protein, 7 aa, synthetic construct
GVSATVQ

SEQ ID NO: 951 - protein, 7 aa, synthetic construct
PIDSHSS

SEQ ID NO: 952 - protein, 7 aa, synthetic construct
EKSPTVV

SEQ ID NO: 953 - protein, 7 aa, synthetic construct
EKGPLIS

SEQ ID NO: 954 - protein, 7 aa, synthetic construct
VTTGNGF

SEQ ID NO: 955 - protein, 7 aa, synthetic construct
KNQQVIM

SEQ ID NO: 956 - protein, 7 aa, synthetic construct
GLMSKIT

SEQ ID NO: 957 - protein, 7 aa, synthetic construct
ANRLSMT

SEQ ID NO: 958 - protein, 7 aa, synthetic construct
APNGIKL

SEQ ID NO: 959 - protein, 7 aa, synthetic construct
QVGSSTY

SEQ ID NO: 960 - protein, 7 aa, synthetic construct
GYQDNQH

SEQ ID NO: 961 - protein, 7 aa, synthetic construct
WQLTENR

SEQ ID NO: 962 - protein, 7 aa, synthetic construct
VSKFRMD

SEQ ID NO: 963 - protein, 7 aa, synthetic construct
RSVTTEQ

SEQ ID NO: 964 - protein, 7 aa, synthetic construct
GYGPSGI

SEQ ID NO: 965 - protein, 7 aa, synthetic construct
SESRKED

SEQ ID NO: 966 - protein, 7 aa, synthetic construct
GRNNDTT

SEQ ID NO: 967 - protein, 7 aa, synthetic construct
EVFDQRR

SEQ ID NO: 968 - protein, 7 aa, synthetic construct
SGERNQE

SEQ ID NO: 969 - protein, 7 aa, synthetic construct
FRIDSTT

SEQ ID NO: 970 - protein, 7 aa, synthetic construct
NENEQQP

SEQ ID NO: 971 - protein, 7 aa, synthetic construct
PPRGENV

SEQ ID NO: 972 - protein, 7 aa, synthetic construct
VTAMAVK

SEQ ID NO: 973 - protein, 7 aa, synthetic construct
GLRAKDM

SEQ ID NO: 974 - protein, 7 aa, synthetic construct
SGLRPQM

SEQ ID NO: 975 - protein, 7 aa, synthetic construct
GMAIVEN

SEQ ID NO: 976 - protein, 7 aa, synthetic construct
GVTARVQ

SEQ ID NO: 977 - protein, 7 aa, synthetic construct
GAREEHK

SEQ ID NO: 978 - protein, 7 aa, synthetic construct
VRERDGY

SEQ ID NO: 979 - protein, 7 aa, synthetic construct
NHYGGPQ

SEQ ID NO: 980 - protein, 7 aa, synthetic construct
RSVTTEQ

SEQ ID NO: 981 - protein, 7 aa, synthetic construct
EIENGVR

SEQ ID NO: 982 - protein, 7 aa, synthetic construct
SMSGITN

SEQ ID NO: 983 - protein, 7 aa, synthetic construct
VNHGGSS

SEQ ID NO: 984 - protein, 7 aa, synthetic construct
YNSEGTR

SEQ ID NO: 985 - protein, 6 aa, synthetic construct
TSPKKK

SEQ ID NO: 986 - protein, 7 aa, synthetic construct
KAMNGIV

SEQ ID NO: 987 - protein, 7 aa, synthetic construct
TETGTSM

SEQ ID NO: 988 - protein, 7 aa, synthetic construct
GAYQNMR

SEQ ID NO: 989 - protein, 7 aa, synthetic construct
ARNLIEG

SEQ ID NO: 990 - protein, 7 aa, synthetic construct
SRSESSL

SEQ ID NO: 991 - protein, 7 aa, synthetic construct
REERDAR

SEQ ID NO: 992 - protein, 7 aa, synthetic construct
SQIIKRE

SEQ ID NO: 993 - protein, 7 aa, synthetic construct
SMNGIIN

SEQ ID NO: 994 - protein, 7 aa, synthetic construct
SKVDITL

SEQ ID NO: 995 - protein, 7 aa, synthetic construct
GLTGNSH

SEQ ID NO: 996 - protein, 7 aa, synthetic construct
NRNTPDN

SEQ ID NO: 997 - protein, 7 aa, synthetic construct
AGKGSEL

SEQ ID NO: 998 - protein, 7 aa, synthetic construct
PGKEQSW

SEQ ID NO: 999 - protein, 7 aa, synthetic construct
GLVGNFS

SEQ ID NO: 1000 - protein, 7 aa, synthetic construct
GIGGTRE

SEQ ID NO: 1001 - RNA, 21 nt, synthetic construct
  source 1..21: mol_type = other RNA
gttaaggtttatggggcgttg

SEQ ID NO: 1002 - RNA, 21 nt, synthetic construct
  source 1..21: mol_type = other RNA
gttaagatttatggggcgttg

SEQ ID NO: 1003 - RNA, 21 nt, synthetic construct
  source 1..21: mol_type = other RNA
ttacttgacaaatggacagca

SEQ ID NO: 1004 - RNA, 21 nt, synthetic construct
  source 1..21: mol_type = other RNA
aagaaggagacgatgattttg

SEQ ID NO: 1005 - RNA, 21 nt, synthetic construct
  source 1..21: mol_type = other RNA
cacgcccctcctgctatggtg

SEQ ID NO: 1006 - RNA, 21 nt, synthetic construct
  source 1..21: mol_type = other RNA
tccagccttggaaaccacagc

SEQ ID NO: 1007 - RNA, 21 nt, synthetic construct
  source 1..21: mol_type = other RNA
gtgaaagtctacggcgctctg

SEQ ID NO: 1008 - RNA, 21 nt, synthetic construct
  source 1..21: mol_type = other RNA
tcggaacccggcgttagcgtt

SEQ ID NO: 1009 - RNA, 21 nt, synthetic construct
  source 1..21: mol_type = other RNA
ctgctgaaaaacggactgatc

SEQ ID NO: 1010 - RNA, 21 nt, synthetic construct
  source 1..21: mol_type = other RNA
ctggtgaaggacgtgaaccag

SEQ ID NO: 1011 - RNA, 21 nt, synthetic construct
  source 1..21: mol_type = other RNA
gttaagagttatggggcgttg

SEQ ID NO: 1012 - RNA, 21 nt, synthetic construct
  source 1..21: mol_type = other RNA
cccctttccagcgccaacctc

SEQ ID NO: 1013 - RNA, 21 nt, synthetic construct
  source 1..21: mol_type = other RNA
gttagactcagcgagcacata

SEQ ID NO: 1014 - RNA, 21 nt, synthetic construct
  source 1..21: mol_type = other RNA
cacttagtagccgacggggtc

SEQ ID NO: 1015 - RNA, 21 nt, synthetic construct
  source 1..21: mol_type = other RNA
cttctccacactactgccaac

SEQ ID NO: 1016 - RNA, 21 nt, synthetic construct
  source 1..21: mol_type = other RNA
aacagaaacgccagcgacaac

SEQ ID NO: 1017 - RNA, 21 nt, synthetic construct
  source 1..21: mol_type = other RNA
cctatgaacggaatcaccaac

SEQ ID NO: 1018 - RNA, 21 nt, synthetic construct
  source 1..21: mol_type = other RNA
ctggtcaaaaacgggcacatc

SEQ ID NO: 1019 - RNA, 21 nt, synthetic construct
  source 1..21: mol_type = other RNA
gtgaaacaagggggggagcag

SEQ ID NO: 1020 - RNA, 21 nt, synthetic construct
  source 1..21: mol_type = other RNA
agcctggtgcagaacgtgcac

SEQ ID NO: 1021 - RNA, 21 nt, synthetic construct
  source 1..21: mol_type = other RNA
gagaccgccaccaagagcatc

SEQ ID NO: 1022 - RNA, 21 nt, synthetic construct
  source 1..21: mol_type = other RNA
ggtgatcctaatcgtgagaag

SEQ ID NO: 1023 - RNA, 21 nt, synthetic construct
  source 1..21: mol_type = other RNA
agcgagagcaagaacctggcc

SEQ ID NO: 1024 - RNA, 21 nt, synthetic construct
  source 1..21: mol_type = other RNA
tcgaggaatgggattactaat

SEQ ID NO: 1025 - RNA, 21 nt, synthetic construct
  source 1..21: mol_type = other RNA
gcgagcaggatagacacgtcc

SEQ ID NO: 1026 - RNA, 21 nt, synthetic construct
  source 1..21: mol_type = other RNA
ggtaagcagggggagaatcag

SEQ ID NO: 1027 - RNA, 21 nt, synthetic construct
  source 1..21: mol_type = other RNA
gccaccagactgagcgaggtg

SEQ ID NO: 1028 - RNA, 21 nt, synthetic construct
  source 1..21: mol_type = other RNA
cctcgagtcggggacactcct

SEQ ID NO: 1029 - RNA, 21 nt, synthetic construct
  source 1..21: mol_type = other RNA
gtcaccgtcggcaacggcttc

SEQ ID NO: 1030 - RNA, 21 nt, synthetic construct
  source 1..21: mol_type = other RNA
ggtcttgggggtaatcgtgag

SEQ ID NO: 1031 - RNA, 21 nt, synthetic construct
  source 1..21: mol_type = other RNA
aacaaaaacacatcagacaac

SEQ ID NO: 1032 - RNA, 21 nt, synthetic construct
  source 1..21: mol_type = other RNA
atcaaaatctacggcgctctc

SEQ ID NO: 1033 - RNA, 21 nt, synthetic construct
  source 1..21: mol_type = other RNA
accagccccaacaacagcgtg

SEQ ID NO: 1034 - RNA, 21 nt, synthetic construct
  source 1..21: mol_type = other RNA
ggcatgcaaggcgtctccaac

SEQ ID NO: 1035 - RNA, 21 nt, synthetic construct
  source 1..21: mol_type = other RNA
aagttggctcataattatgat

SEQ ID NO: 1036 - RNA, 21 nt, synthetic construct
  source 1..21: mol_type = other RNA
ggcctgaccggctacacccac

SEQ ID NO: 1037 - RNA, 21 nt, synthetic construct
  source 1..21: mol_type = other RNA
cggagagagaggacggagcag

SEQ ID NO: 1038 - RNA, 21 nt, synthetic construct
  source 1..21: mol_type = other RNA
cggagtgagaggacggagcag

SEQ ID NO: 1039 - RNA, 21 nt, synthetic construct
  source 1..21: mol_type = other RNA
cctgagagtagtgctaatctg

SEQ ID NO: 1040 - RNA, 21 nt, synthetic construct
  source 1..21: mol_type = other RNA
cccaccagaggcgagaacatg

SEQ ID NO: 1041 - RNA, 21 nt, synthetic construct
  source 1..21: mol_type = other RNA
aatggtaaggggattgagatg

SEQ ID NO: 1042 - RNA, 21 nt, synthetic construct
  source 1..21: mol_type = other RNA
acgtcgccgaaaaatagtgag

SEQ ID NO: 1043 - RNA, 21 nt, synthetic construct
  source 1..21: mol_type = other RNA
ggcagagccagcgccgacaac

SEQ ID NO: 1044 - RNA, 21 nt, synthetic construct
  source 1..21: mol_type = other RNA
gcgagtcaggagccgtctcgt

SEQ ID NO: 1045 - RNA, 21 nt, synthetic construct
  source 1..21: mol_type = other RNA
gcggtgagtgttggtcagaag

SEQ ID NO: 1046 - RNA, 21 nt, synthetic construct
  source 1..21: mol_type = other RNA
agaaccagcaacagcgagatc

SEQ ID NO: 1047 - RNA, 21 nt, synthetic construct
  source 1..21: mol_type = other RNA
ctgatgaacggcatcaccaac

SEQ ID NO: 1048 - RNA, 21 nt, synthetic construct
  source 1..21: mol_type = other RNA
ggcatggccatcgtcgaagac

SEQ ID NO: 1049 - RNA, 21 nt, synthetic construct
  source 1..21: mol_type = other RNA
accggcgagagaaaccaggtg

SEQ ID NO: 1050 - RNA, 21 nt, synthetic construct
  source 1..21: mol_type = other RNA
agaaacgcccccaacatcgac

SEQ ID NO: 1051 - RNA, 21 nt, synthetic construct
  source 1..21: mol_type = other RNA
acgtcgccgaaaaaaagtgag

SEQ ID NO: 1052 - RNA, 21 nt, synthetic construct
  source 1..21: mol_type = other RNA
aacctggtgagcagcgccatg

SEQ ID NO: 1053 - RNA, 21 nt, synthetic construct
  source 1..21: mol_type = other RNA
gcgttgagtgctggtcagaag

SEQ ID NO: 1054 - RNA, 21 nt, synthetic construct
  source 1..21: mol_type = other RNA
agaagcgcccccaacatggac

SEQ ID NO: 1055 - RNA, 21 nt, synthetic construct
  source 1..21: mol_type = other RNA
ggtgtgtctgctaaggttcag

SEQ ID NO: 1056 - RNA, 21 nt, synthetic construct
  source 1..21: mol_type = other RNA
gcccacgagagaggccagctg

SEQ ID NO: 1057 - RNA, 21 nt, synthetic construct
  source 1..21: mol_type = other RNA
gcgttgagtgttggtcagaag

SEQ ID NO: 1058 - RNA, 21 nt, synthetic construct
  source 1..21: mol_type = other RNA
atcagagaccagaccgccatc

SEQ ID NO: 1059 - RNA, 21 nt, synthetic construct
  source 1..21: mol_type = other RNA
gacgtgaagagcgacaacgag

SEQ ID NO: 1060 - RNA, 21 nt, synthetic construct
  source 1..21: mol_type = other RNA
aataatactgagggtactcgg

SEQ ID NO: 1061 - RNA, 21 nt, synthetic construct
  source 1..21: mol_type = other RNA
aaggagacccagcacctgatc

SEQ ID NO: 1062 - RNA, 21 nt, synthetic construct
  source 1..21: mol_type = other RNA
agtagtgagaagatttcgagt

SEQ ID NO: 1063 - RNA, 21 nt, synthetic construct
  source 1..21: mol_type = other RNA
accggcgacagaaaccaggtg

SEQ ID NO: 1064 - RNA, 21 nt, synthetic construct
  source 1..21: mol_type = other RNA
ggcagacacaacgagatcacc

SEQ ID NO: 1065 - RNA, 21 nt, synthetic construct
  source 1..21: mol_type = other RNA
gagattaagcctattgatcgt

SEQ ID NO: 1066 - RNA, 21 nt, synthetic construct
  source 1..21: mol_type = other RNA
agcgagagcagacaggaggac

SEQ ID NO: 1067 - RNA, 21 nt, synthetic construct
  source 1..21: mol_type = other RNA
agaaccagcaacagcgacatc

SEQ ID NO: 1068 - RNA, 21 nt, synthetic construct
  source 1..21: mol_type = other RNA
agcgaccccaagatccacaag

SEQ ID NO: 1069 - RNA, 21 nt, synthetic construct
  source 1..21: mol_type = other RNA
agaagagacctgctggacggc

SEQ ID NO: 1070 - RNA, 21 nt, synthetic construct
  source 1..21: mol_type = other RNA
ggctccttccacgtcgaaatg

SEQ ID NO: 1071 - RNA, 21 nt, synthetic construct
  source 1..21: mol_type = other RNA
caaaacaccgggggaagctct

SEQ ID NO: 1072 - RNA, 21 nt, synthetic construct
  source 1..21: mol_type = other RNA
atccttaacgggatggtcctg

SEQ ID NO: 1073 - RNA, 21 nt, synthetic construct
  source 1..21: mol_type = other RNA
ggcaacaaactgcacatagac

SEQ ID NO: 1074 - RNA, 21 nt, synthetic construct
  source 1..21: mol_type = other RNA
ctggcaacctccagaggcagt

SEQ ID NO: 1075 - RNA, 21 nt, synthetic construct
  source 1..21: mol_type = other RNA
aagctgggccacaactacggc

SEQ ID NO: 1076 - RNA, 21 nt, synthetic construct
  source 1..21: mol_type = other RNA
accggcttggcagtacactca

SEQ ID NO: 1077 - RNA, 21 nt, synthetic construct
  source 1..21: mol_type = other RNA
accatccacaacgtgatcatc

SEQ ID NO: 1078 - RNA, 21 nt, synthetic construct
  source 1..21: mol_type = other RNA
gtgggcagagagagagccatc

SEQ ID NO: 1079 - RNA, 21 nt, synthetic construct
  source 1..21: mol_type = other RNA
acgattcatcaggttattaat

SEQ ID NO: 1080 - RNA, 21 nt, synthetic construct
  source 1..21: mol_type = other RNA
aacagcggcgacaacagactg

SEQ ID NO: 1081 - RNA, 21 nt, synthetic construct
  source 1..21: mol_type = other RNA
ggtcttgggagtactcgtgag

SEQ ID NO: 1082 - RNA, 21 nt, synthetic construct
  source 1..21: mol_type = other RNA
atgaaagacaaaatgatactt

SEQ ID NO: 1083 - RNA, 21 nt, synthetic construct
  source 1..21: mol_type = other RNA
cccaccagaggcgagaacgag

SEQ ID NO: 1084 - RNA, 21 nt, synthetic construct
  source 1..21: mol_type = other RNA
gccaaggcccccggcaccggc

SEQ ID NO: 1085 - RNA, 21 nt, synthetic construct
  source 1..21: mol_type = other RNA
ggctacgtgctgaagaccagc

SEQ ID NO: 1086 - RNA, 21 nt, synthetic construct
  source 1..21: mol_type = other RNA
gtgaccatcggcaacggcctg

SEQ ID NO: 1087 - RNA, 21 nt, synthetic construct
  source 1..21: mol_type = other RNA
tggaaagaaacccaaggggac

SEQ ID NO: 1088 - RNA, 21 nt, synthetic construct
  source 1..21: mol_type = other RNA
gagcacgacgccagcagaaac

SEQ ID NO: 1089 - RNA, 21 nt, synthetic construct
  source 1..21: mol_type = other RNA
atggtgacccagcacctgatc

SEQ ID NO: 1090 - RNA, 21 nt, synthetic construct
  source 1..21: mol_type = other RNA
aaagacccgggaagcgctgcc

SEQ ID NO: 1091 - RNA, 21 nt, synthetic construct
  source 1..21: mol_type = other RNA
aagagagaggactacaaccac

SEQ ID NO: 1092 - RNA, 21 nt, synthetic construct
  source 1..21: mol_type = other RNA
tcgtggggaaacatccaaacc

SEQ ID NO: 1093 - RNA, 21 nt, synthetic construct
  source 1..21: mol_type = other RNA
tctcagggggctgagtcgatt

SEQ ID NO: 1094 - RNA, 21 nt, synthetic construct
  source 1..21: mol_type = other RNA
ggagtcatgcaaacccaaaac

SEQ ID NO: 1095 - RNA, 21 nt, synthetic construct
  source 1..21: mol_type = other RNA
ggaataatccaaacccaaaac

SEQ ID NO: 1096 - RNA, 21 nt, synthetic construct
  source 1..21: mol_type = other RNA
aatcagacggagtcgcggggg

SEQ ID NO: 1097 - RNA, 21 nt, synthetic construct
  source 1..21: mol_type = other RNA
cccgagaacaccaagatcaac

SEQ ID NO: 1098 - RNA, 21 nt, synthetic construct
  source 1..21: mol_type = other RNA
ggcctgaccggctacccccac

SEQ ID NO: 1099 - RNA, 21 nt, synthetic construct
  source 1..21: mol_type = other RNA
agcagagacgacaccatcagc

SEQ ID NO: 1100 - RNA, 21 nt, synthetic construct
  source 1..21: mol_type = other RNA
agtgggtctcgggatacgagg

SEQ ID NO: 1101 - RNA, 21 nt, synthetic construct
  source 1..21: mol_type = other RNA
accaaccaccaggacaacaag

SEQ ID NO: 1102 - RNA, 21 nt, synthetic construct
  source 1..21: mol_type = other RNA
ctggggagtgagagtgcgatt

SEQ ID NO: 1103 - RNA, 21 nt, synthetic construct
  source 1..21: mol_type = other RNA
cggacctccaacggcgacatc

SEQ ID NO: 1104 - RNA, 21 nt, synthetic construct
  source 1..21: mol_type = other RNA
ccgtataatcttcttagttct

SEQ ID NO: 1105 - RNA, 21 nt, synthetic construct
  source 1..21: mol_type = other RNA
tacttgaaaaacaacgatatg

SEQ ID NO: 1106 - RNA, 21 nt, synthetic construct
  source 1..21: mol_type = other RNA
ggtgctcgtgaggagcatacg

SEQ ID NO: 1107 - RNA, 21 nt, synthetic construct
  source 1..21: mol_type = other RNA
gagaaggtggtgaaggtgacc

SEQ ID NO: 1108 - RNA, 21 nt, synthetic construct
  source 1..21: mol_type = other RNA
ctgcacgacttcagcaccgcc

SEQ ID NO: 1109 - RNA, 21 nt, synthetic construct
  source 1..21: mol_type = other RNA
gtgcacgccagcgccgccaac

SEQ ID NO: 1110 - RNA, 21 nt, synthetic construct
  source 1..21: mol_type = other RNA
ggggttagtgcaagcgtccac

SEQ ID NO: 1111 - RNA, 21 nt, synthetic construct
  source 1..21: mol_type = other RNA
ctgagagagagagacggccac

SEQ ID NO: 1112 - RNA, 21 nt, synthetic construct
  source 1..21: mol_type = other RNA
aaaggactgatcaaccaacaa

SEQ ID NO: 1113 - RNA, 21 nt, synthetic construct
  source 1..21: mol_type = other RNA
tccggcctttccggaaaaatg

SEQ ID NO: 1114 - RNA, 21 nt, synthetic construct
  source 1..21: mol_type = other RNA
agcgtgggcctgaccaagatc

SEQ ID NO: 1115 - RNA, 21 nt, synthetic construct
  source 1..21: mol_type = other RNA
gacaaagtcggcgtcgccgtg

SEQ ID NO: 1116 - RNA, 21 nt, synthetic construct
  source 1..21: mol_type = other RNA
agagacgacagagacgccaga

SEQ ID NO: 1117 - RNA, 21 nt, synthetic construct
  source 1..21: mol_type = other RNA
ccaaaactcgaaaccgttctt

SEQ ID NO: 1118 - RNA, 21 nt, synthetic construct
  source 1..21: mol_type = other RNA
ggtcttgggggtactcctgag

SEQ ID NO: 1119 - RNA, 21 nt, synthetic construct
  source 1..21: mol_type = other RNA
agcaagcccgagaccgtgctg

SEQ ID NO: 1120 - RNA, 21 nt, synthetic construct
  source 1..21: mol_type = other RNA
gaattgtctcggcttacgctt

SEQ ID NO: 1121 - RNA, 21 nt, synthetic construct
  source 1..21: mol_type = other RNA
caaatcagagggatgggcatg

SEQ ID NO: 1122 - RNA, 21 nt, synthetic construct
  source 1..21: mol_type = other RNA
accgaacccggcatgagcgtc

SEQ ID NO: 1123 - RNA, 21 nt, synthetic construct
  source 1..21: mol_type = other RNA
cccggcacctacggcggcgag

SEQ ID NO: 1124 - RNA, 21 nt, synthetic construct
  source 1..21: mol_type = other RNA
ggcatggccatcgtcgaaaac

SEQ ID NO: 1125 - RNA, 21 nt, synthetic construct
  source 1..21: mol_type = other RNA
gggacgcgtcttagtgagggg

SEQ ID NO: 1126 - RNA, 21 nt, synthetic construct
  source 1..21: mol_type = other RNA
gtgcagcaggcccaggcccag

SEQ ID NO: 1127 - DNA, 21 bp, synthetic construct
  source 1..21: mol_type = other DNA
accgaggtgcaagcacaggcg

SEQ ID NO: 1128 - RNA, 21 nt, synthetic construct
  source 1..21: mol_type = other RNA
ctaactgacaccaaactaccg

SEQ ID NO: 1129 - RNA, 21 nt, synthetic construct
  source 1..21: mol_type = other RNA
gtggggagtaagagtgcgatt

SEQ ID NO: 1130 - RNA, 21 nt, synthetic construct
  source 1..21: mol_type = other RNA
gcccacgacagaggccagctg

SEQ ID NO: 1131 - RNA, 21 nt, synthetic construct
  source 1..21: mol_type = other RNA
ggtttgtcgcagaagatgttg

SEQ ID NO: 1132 - RNA, 21 nt, synthetic construct
  source 1..21: mol_type = other RNA
gacagcgagaagagagacctg

SEQ ID NO: 1133 - RNA, 21 nt, synthetic construct
  source 1..21: mol_type = other RNA
agcgagagaagacaggccgac

SEQ ID NO: 1134 - RNA, 21 nt, synthetic construct
  source 1..21: mol_type = other RNA
agactgggccacagcatggac

SEQ ID NO: 1135 - RNA, 21 nt, synthetic construct
  source 1..21: mol_type = other RNA
aaggccgtggacggcatcgtg

SEQ ID NO: 1136 - RNA, 21 nt, synthetic construct
  source 1..21: mol_type = other RNA
tttacgttgaaggggtctggt

SEQ ID NO: 1137 - RNA, 21 nt, synthetic construct
  source 1..21: mol_type = other RNA
cagattcgtggtatggagacg

SEQ ID NO: 1138 - RNA, 21 nt, synthetic construct
  source 1..21: mol_type = other RNA
ggcttcggcctgagcggcaac

SEQ ID NO: 1139 - RNA, 21 nt, synthetic construct
  source 1..21: mol_type = other RNA
cccggctcatacggcgtctca

SEQ ID NO: 1140 - RNA, 21 nt, synthetic construct
  source 1..21: mol_type = other RNA
gggtttttgtctggtcctgtt

SEQ ID NO: 1141 - RNA, 21 nt, synthetic construct
  source 1..21: mol_type = other RNA
caaaccatcggcaacggattc

SEQ ID NO: 1142 - DNA, 21 bp, synthetic construct
  source 1..21: mol_type = other DNA
accactgccaacaactccgaa

SEQ ID NO: 1143 - RNA, 21 nt, synthetic construct
  source 1..21: mol_type = other RNA
aggctcaaccaccttgacacc

SEQ ID NO: 1144 - RNA, 21 nt, synthetic construct
  source 1..21: mol_type = other RNA
gccacacggctgtcagacgta

SEQ ID NO: 1145 - RNA, 21 nt, synthetic construct
  source 1..21: mol_type = other RNA
aatgatcctaagattcataag

SEQ ID NO: 1146 - RNA, 21 nt, synthetic construct
  source 1..21: mol_type = other RNA
ggcacaaacagtaaaatggtt

SEQ ID NO: 1147 - DNA, 21 bp, synthetic construct
  source 1..21: mol_type = other DNA
gtgagcaacttcgccacccac

SEQ ID NO: 1148 - RNA, 21 nt, synthetic construct
  source 1..21: mol_type = other RNA
atgaacggcgtgagcccccac

SEQ ID NO: 1149 - RNA, 21 nt, synthetic construct
  source 1..21: mol_type = other RNA
acacgtaacgtaatcgaagga

SEQ ID NO: 1150 - RNA, 21 nt, synthetic construct
  source 1..21: mol_type = other RNA
ctgaaggagcccatgatgctg

SEQ ID NO: 1151 - RNA, 21 nt, synthetic construct
  source 1..21: mol_type = other RNA
ggcaagatgaacgtgcacagc

SEQ ID NO: 1152 - RNA, 21 nt, synthetic construct
  source 1..21: mol_type = other RNA
atgatgaagattgggacgggg

SEQ ID NO: 1153 - RNA, 21 nt, synthetic construct
  source 1..21: mol_type = other RNA
gatcttcgtacttctacgctg

SEQ ID NO: 1154 - RNA, 21 nt, synthetic construct
  source 1..21: mol_type = other RNA
gagaagggcaagctgatcgcc

SEQ ID NO: 1155 - RNA, 21 nt, synthetic construct
  source 1..21: mol_type = other RNA
caacaaggcgtgtcaagccca

SEQ ID NO: 1156 - RNA, 21 nt, synthetic construct
  source 1..21: mol_type = other RNA
cggatgactagggatgatacg

SEQ ID NO: 1157 - RNA, 21 nt, synthetic construct
  source 1..21: mol_type = other RNA
atcgacagattcgagagcagc

SEQ ID NO: 1158 - RNA, 21 nt, synthetic construct
  source 1..21: mol_type = other RNA
ctgagagtgggcgacaccctg

SEQ ID NO: 1159 - RNA, 21 nt, synthetic construct
  source 1..21: mol_type = other RNA
cagatcagaggcatggagatc

SEQ ID NO: 1160 - RNA, 21 nt, synthetic construct
  source 1..21: mol_type = other RNA
cttgtgagggaaggtcgggag

SEQ ID NO: 1161 - RNA, 21 nt, synthetic construct
  source 1..21: mol_type = other RNA
gagattgtgaatgcggttcgg

SEQ ID NO: 1162 - RNA, 21 nt, synthetic construct
  source 1..21: mol_type = other RNA
actggtaaggggattgagtcg

SEQ ID NO: 1163 - RNA, 21 nt, synthetic construct
  source 1..21: mol_type = other RNA
ggccacgaggacaaccagcac

SEQ ID NO: 1164 - RNA, 21 nt, synthetic construct
  source 1..21: mol_type = other RNA
aagttgagtcataattatgat

SEQ ID NO: 1165 - RNA, 21 nt, synthetic construct
  source 1..21: mol_type = other RNA
cagatcagaggcatggagacc

SEQ ID NO: 1166 - RNA, 21 nt, synthetic construct
  source 1..21: mol_type = other RNA
gacaaggctaacctacacacc

SEQ ID NO: 1167 - RNA, 21 nt, synthetic construct
  source 1..21: mol_type = other RNA
aaaaacacaaccggggtgagt

SEQ ID NO: 1168 - RNA, 21 nt, synthetic construct
  source 1..21: mol_type = other RNA
gatgtggtgaatcctgggaag

SEQ ID NO: 1169 - RNA, 21 nt, synthetic construct
  source 1..21: mol_type = other RNA
cagctgagcaccgccagcacc

SEQ ID NO: 1170 - RNA, 21 nt, synthetic construct
  source 1..21: mol_type = other RNA
aacgaagtaggcaccaaatca

SEQ ID NO: 1171 - RNA, 21 nt, synthetic construct
  source 1..21: mol_type = other RNA
aaatggtccgtgaacctcgaa

SEQ ID NO: 1172 - RNA, 21 nt, synthetic construct
  source 1..21: mol_type = other RNA
aacggattcgccgtacactca

SEQ ID NO: 1173 - RNA, 21 nt, synthetic construct
  source 1..21: mol_type = other RNA
aacgtcgtcagctctagtatg

SEQ ID NO: 1174 - RNA, 21 nt, synthetic construct
  source 1..21: mol_type = other RNA
accatcaaccaagtaatcaaa

SEQ ID NO: 1175 - RNA, 21 nt, synthetic construct
  source 1..21: mol_type = other RNA
caggttgtgtcgtctactgtt

SEQ ID NO: 1176 - RNA, 21 nt, synthetic construct
  source 1..21: mol_type = other RNA
gcgacaaactctgaaaaagtt

SEQ ID NO: 1177 - RNA, 21 nt, synthetic construct
  source 1..21: mol_type = other RNA
gtgaccgccaccaagagcatc

SEQ ID NO: 1178 - RNA, 21 nt, synthetic construct
  source 1..21: mol_type = other RNA
aacatccacaaggtgatcatg

SEQ ID NO: 1179 - RNA, 21 nt, synthetic construct
  source 1..21: mol_type = other RNA
cacataaaatcgtccgaaaca

SEQ ID NO: 1180 - RNA, 21 nt, synthetic construct
  source 1..21: mol_type = other RNA
tttattaataatttgcagatg

SEQ ID NO: 1181 - DNA, 21 bp, synthetic construct
  source 1..21: mol_type = other DNA
gccgacggcctctcaaaaatg

SEQ ID NO: 1182 - RNA, 21 nt, synthetic construct
  source 1..21: mol_type = other RNA
gagaagagtccgtctgtgatg

SEQ ID NO: 1183 - RNA, 21 nt, synthetic construct
  source 1..21: mol_type = other RNA
agcggcgccatgggcggcgtg

SEQ ID NO: 1184 - RNA, 21 nt, synthetic construct
  source 1..21: mol_type = other RNA
cagcagggggatacttcgtct

SEQ ID NO: 1185 - RNA, 21 nt, synthetic construct
  source 1..21: mol_type = other RNA
gatcgtgatggtaataagctg

SEQ ID NO: 1186 - RNA, 21 nt, synthetic construct
  source 1..21: mol_type = other RNA
ctggtgaaggacctgacccag

SEQ ID NO: 1187 - RNA, 21 nt, synthetic construct
  source 1..21: mol_type = other RNA
gtcccacaggcccaagcccaa

SEQ ID NO: 1188 - RNA, 21 nt, synthetic construct
  source 1..21: mol_type = other RNA
gggagtctgactgagactcgt

SEQ ID NO: 1189 - RNA, 21 nt, synthetic construct
  source 1..21: mol_type = other RNA
aaccacaccgagagcagaggc

SEQ ID NO: 1190 - DNA, 21 bp, synthetic construct
  source 1..21: mol_type = other DNA
tggaaagaaacgcaagcagtg

SEQ ID NO: 1191 - RNA, 21 nt, synthetic construct
  source 1..21: mol_type = other RNA
ggcgtggacaacgccggcaga

SEQ ID NO: 1192 - RNA, 21 nt, synthetic construct
  source 1..21: mol_type = other RNA
aatagtatgggtgagaggggg

SEQ ID NO: 1193 - RNA, 21 nt, synthetic construct
  source 1..21: mol_type = other RNA
ggcctgaccagagtgagcgac

SEQ ID NO: 1194 - RNA, 21 nt, synthetic construct
  source 1..21: mol_type = other RNA
acacggagcccacccgtcagc

SEQ ID NO: 1195 - RNA, 21 nt, synthetic construct
  source 1..21: mol_type = other RNA
gacgtgaagagcagcgagacc

SEQ ID NO: 1196 - RNA, 21 nt, synthetic construct
  source 1..21: mol_type = other RNA
ggcagctacgaccagggcatg

SEQ ID NO: 1197 - RNA, 21 nt, synthetic construct
  source 1..21: mol_type = other RNA
ggcagcaacatggccacccac

SEQ ID NO: 1198 - RNA, 21 nt, synthetic construct
  source 1..21: mol_type = other RNA
aactccggggacaaccaaccc

SEQ ID NO: 1199 - RNA, 21 nt, synthetic construct
  source 1..21: mol_type = other RNA
aacagaaacaacagcgacaac

SEQ ID NO: 1200 - RNA, 21 nt, synthetic construct
  source 1..21: mol_type = other RNA
cagttcgccagctacgccgcc

SEQ ID NO: 1201 - RNA, 21 nt, synthetic construct
  source 1..21: mol_type = other RNA
acccgcttctccggaacagtg

SEQ ID NO: 1202 - RNA, 21 nt, synthetic construct
  source 1..21: mol_type = other RNA
accagattcagcggcaccgtg

SEQ ID NO: 1203 - RNA, 21 nt, synthetic construct
  source 1..21: mol_type = other RNA
gacaaaaacaccgctaccggc

SEQ ID NO: 1204 - RNA, 21 nt, synthetic construct
  source 1..21: mol_type = other RNA
caaaccacgggaggctccctt

SEQ ID NO: 1205 - RNA, 21 nt, synthetic construct
  source 1..21: mol_type = other RNA
agccttgtcggaagtggcatc

SEQ ID NO: 1206 - RNA, 21 nt, synthetic construct
  source 1..21: mol_type = other RNA
ggaggatcccacgtcgaaatg

SEQ ID NO: 1207 - RNA, 21 nt, synthetic construct
  source 1..21: mol_type = other RNA
gtgccgcaagcacaggcgaag

SEQ ID NO: 1208 - RNA, 21 nt, synthetic construct
  source 1..21: mol_type = other RNA
gccaccagactgagcgacggc

SEQ ID NO: 1209 - RNA, 21 nt, synthetic construct
  source 1..21: mol_type = other RNA
agtggtgcgatgggtgggaag

SEQ ID NO: 1210 - RNA, 21 nt, synthetic construct
  source 1..21: mol_type = other RNA
agcggcgtgagagagggcaga

SEQ ID NO: 1211 - RNA, 21 nt, synthetic construct
  source 1..21: mol_type = other RNA
ggcagactgaccgagacccac

SEQ ID NO: 1212 - RNA, 21 nt, synthetic construct
  source 1..21: mol_type = other RNA
tcccgggtcgacgtaaaccgg

SEQ ID NO: 1213 - RNA, 21 nt, synthetic construct
  source 1..21: mol_type = other RNA
agcgaatccaaacaactatcc

SEQ ID NO: 1214 - RNA, 21 nt, synthetic construct
  source 1..21: mol_type = other RNA
ggccgccacaacgaaacaaca

SEQ ID NO: 1215 - RNA, 21 nt, synthetic construct
  source 1..21: mol_type = other RNA
cctgttggggttcatattaag

SEQ ID NO: 1216 - RNA, 21 nt, synthetic construct
  source 1..21: mol_type = other RNA
agaagaagcggcctggagatg

SEQ ID NO: 1217 - RNA, 21 nt, synthetic construct
  source 1..21: mol_type = other RNA
tctcaaagcttcaactcaggc

SEQ ID NO: 1218 - RNA, 21 nt, synthetic construct
  source 1..21: mol_type = other RNA
gtgggtgcttcggctgcgaat

SEQ ID NO: 1219 - RNA, 21 nt, synthetic construct
  source 1..21: mol_type = other RNA
aaccacaacggaggcccacct

SEQ ID NO: 1220 - RNA, 21 nt, synthetic construct
  source 1..21: mol_type = other RNA
gtgattggtatggctgttaag

SEQ ID NO: 1221 - RNA, 21 nt, synthetic construct
  source 1..21: mol_type = other RNA
catgcgatgattcatggtgtg

SEQ ID NO: 1222 - RNA, 21 nt, synthetic construct
  source 1..21: mol_type = other RNA
ggtaatggtacgcgtagtccg

SEQ ID NO: 1223 - RNA, 21 nt, synthetic construct
  source 1..21: mol_type = other RNA
cgggagagggctgatacgact

SEQ ID NO: 1224 - RNA, 21 nt, synthetic construct
  source 1..21: mol_type = other RNA
aacagaaacaccgccgacaac

SEQ ID NO: 1225 - RNA, 21 nt, synthetic construct
  source 1..21: mol_type = other RNA
aaggtcgtttcatcggacatg

SEQ ID NO: 1226 - RNA, 21 nt, synthetic construct
  source 1..21: mol_type = other RNA
aacgagaacgagcagagaaga

SEQ ID NO: 1227 - RNA, 21 nt, synthetic construct
  source 1..21: mol_type = other RNA
agtaggtcggagagtttgcag

SEQ ID NO: 1228 - RNA, 21 nt, synthetic construct
  source 1..21: mol_type = other RNA
gtggataagagtatggtgaag

SEQ ID NO: 1229 - RNA, 21 nt, synthetic construct
  source 1..21: mol_type = other RNA
ggcaccctgcccatcatggcc

SEQ ID NO: 1230 - RNA, 21 nt, synthetic construct
  source 1..21: mol_type = other RNA
gagctggacgccaccagcaag

SEQ ID NO: 1231 - RNA, 21 nt, synthetic construct
  source 1..21: mol_type = other RNA
ccgactgagaattcgggtgtt

SEQ ID NO: 1232 - RNA, 21 nt, synthetic construct
  source 1..21: mol_type = other RNA
ccccagagcatcaacagcggc

SEQ ID NO: 1233 - RNA, 21 nt, synthetic construct
  source 1..21: mol_type = other RNA
cacggccctccagcaatagtg

SEQ ID NO: 1234 - RNA, 21 nt, synthetic construct
  source 1..21: mol_type = other RNA
agttgggggaatattcagact

SEQ ID NO: 1235 - RNA, 21 nt, synthetic construct
  source 1..21: mol_type = other RNA
aacgacttcagacacgtggtg

SEQ ID NO: 1236 - DNA, 21 bp, synthetic construct
  source 1..21: mol_type = other DNA
atggagaacggcgtgaagaga

SEQ ID NO: 1237 - RNA, 21 nt, synthetic construct
  source 1..21: mol_type = other RNA
ggggagatgcggtctcatgtg

SEQ ID NO: 1238 - RNA, 21 nt, synthetic construct
  source 1..21: mol_type = other RNA
ggatacgaagactaccaacac

SEQ ID NO: 1239 - RNA, 21 nt, synthetic construct
  source 1..21: mol_type = other RNA
tctaagagtaatgggacgctt

SEQ ID NO: 1240 - RNA, 21 nt, synthetic construct
  source 1..21: mol_type = other RNA
gtgctgagccccaagatcgtg

SEQ ID NO: 1241 - RNA, 21 nt, synthetic construct
  source 1..21: mol_type = other RNA
ggcgtgagcaagaccctgctg

SEQ ID NO: 1242 - RNA, 21 nt, synthetic construct
  source 1..21: mol_type = other RNA
gccagcaccggcatcaagctg

SEQ ID NO: 1243 - RNA, 21 nt, synthetic construct
  source 1..21: mol_type = other RNA
ggcatgacgggcctaaacatg

SEQ ID NO: 1244 - RNA, 21 nt, synthetic construct
  source 1..21: mol_type = other RNA
ggcgtcagcgcccgagcccaa

SEQ ID NO: 1245 - RNA, 21 nt, synthetic construct
  source 1..21: mol_type = other RNA
caacaaggcataagcagtagc

SEQ ID NO: 1246 - RNA, 21 nt, synthetic construct
  source 1..21: mol_type = other RNA
cccagaaacgtgatcgagggc

SEQ ID NO: 1247 - RNA, 21 nt, synthetic construct
  source 1..21: mol_type = other RNA
gtgtttgaggcgcatagtgtt

SEQ ID NO: 1248 - RNA, 21 nt, synthetic construct
  source 1..21: mol_type = other RNA
agcctgctgaccggctacatc

SEQ ID NO: 1249 - RNA, 21 nt, synthetic construct
  source 1..21: mol_type = other RNA
gtttcaagcggaaacggcttc

SEQ ID NO: 1250 - RNA, 21 nt, synthetic construct
  source 1..21: mol_type = other RNA
agtagggggaatattcagtct

SEQ ID NO: 1251 - RNA, 21 nt, synthetic construct
  source 1..21: mol_type = other RNA
gtggataagagtatgatgagg

SEQ ID NO: 1252 - RNA, 21 nt, synthetic construct
  source 1..21: mol_type = other RNA
atggatacgcagcatattatt

SEQ ID NO: 1253 - RNA, 21 nt, synthetic construct
  source 1..21: mol_type = other RNA
ggcgtacttcacatcgcatcc

SEQ ID NO: 1254 - RNA, 21 nt, synthetic construct
  source 1..21: mol_type = other RNA
cggaccagctacagcgacata

SEQ ID NO: 1255 - RNA, 21 nt, synthetic construct
  source 1..21: mol_type = other RNA
aacagcgtgagccaccagtac

SEQ ID NO: 1256 - RNA, 21 nt, synthetic construct
  source 1..21: mol_type = other RNA
actctgatgcataattcgagt

SEQ ID NO: 1257 - RNA, 21 nt, synthetic construct
  source 1..21: mol_type = other RNA
accgagagcagacaggccgac

SEQ ID NO: 1258 - RNA, 21 nt, synthetic construct
  source 1..21: mol_type = other RNA
tctggctcccaagacaccaca

SEQ ID NO: 1259 - RNA, 21 nt, synthetic construct
  source 1..21: mol_type = other RNA
caggtgggcagcagcaccttc

SEQ ID NO: 1260 - RNA, 21 nt, synthetic construct
  source 1..21: mol_type = other RNA
ccttatgatagtcctacgagt

SEQ ID NO: 1261 - RNA, 21 nt, synthetic construct
  source 1..21: mol_type = other RNA
ggcatcaccgagaagagctac

SEQ ID NO: 1262 - RNA, 21 nt, synthetic construct
  source 1..21: mol_type = other RNA
gtgaccggcatgagcgtgaag

SEQ ID NO: 1263 - RNA, 21 nt, synthetic construct
  source 1..21: mol_type = other RNA
gtcgcatacaaatccttgtca

SEQ ID NO: 1264 - RNA, 21 nt, synthetic construct
  source 1..21: mol_type = other RNA
ggcatcaaggagaagaactac

SEQ ID NO: 1265 - RNA, 21 nt, synthetic construct
  source 1..21: mol_type = other RNA
ccggcattgagaccccaaatg

SEQ ID NO: 1266 - RNA, 21 nt, synthetic construct
  source 1..21: mol_type = other RNA
gcactgaccgtgggacaaaaa

SEQ ID NO: 1267 - RNA, 21 nt, synthetic construct
  source 1..21: mol_type = other RNA
atgagagaccagaccgccatc

SEQ ID NO: 1268 - RNA, 21 nt, synthetic construct
  source 1..21: mol_type = other RNA
gggattcaggagaaggcgcat

SEQ ID NO: 1269 - RNA, 21 nt, synthetic construct
  source 1..21: mol_type = other RNA
agcggcgtgagcgacggcaga

SEQ ID NO: 1270 - RNA, 21 nt, synthetic construct
  source 1..21: mol_type = other RNA
gactacctgagcagaggcgtg

SEQ ID NO: 1271 - RNA, 21 nt, synthetic construct
  source 1..21: mol_type = other RNA
gtcatcaaagacagagaactg

SEQ ID NO: 1272 - RNA, 21 nt, synthetic construct
  source 1..21: mol_type = other RNA
gacgttgaaaaccccggcaaa

SEQ ID NO: 1273 - RNA, 21 nt, synthetic construct
  source 1..21: mol_type = other RNA
cccaccagaggcgagaacctg

SEQ ID NO: 1274 - RNA, 21 nt, synthetic construct
  source 1..21: mol_type = other RNA
gtgctgagccccaacatcatg

SEQ ID NO: 1275 - RNA, 21 nt, synthetic construct
  source 1..21: mol_type = other RNA
gtcacaataggcaacggctac

SEQ ID NO: 1276 - RNA, 21 nt, synthetic construct
  source 1..21: mol_type = other RNA
ggctacggcctgagcggcatc

SEQ ID NO: 1277 - RNA, 21 nt, synthetic construct
  source 1..21: mol_type = other RNA
ggttacgaagttaaccaacac

SEQ ID NO: 1278 - RNA, 21 nt, synthetic construct
  source 1..21: mol_type = other RNA
gtgaaaagctacggcgcactt

SEQ ID NO: 1279 - RNA, 21 nt, synthetic construct
  source 1..21: mol_type = other RNA
aaggatactggttctgaggtg

SEQ ID NO: 1280 - RNA, 21 nt, synthetic construct
  source 1..21: mol_type = other RNA
atgatgaagaccgagaccggc

SEQ ID NO: 1281 - RNA, 21 nt, synthetic construct
  source 1..21: mol_type = other RNA
cccttcgacagccacaccagc

SEQ ID NO: 1282 - RNA, 21 nt, synthetic construct
  source 1..21: mol_type = other RNA
cagtttcgtggtatggagatg

SEQ ID NO: 1283 - RNA, 21 nt, synthetic construct
  source 1..21: mol_type = other RNA
cgactggtccaaaacgaagac

SEQ ID NO: 1284 - RNA, 21 nt, synthetic construct
  source 1..21: mol_type = other RNA
ggcataccttggaacacccaa

SEQ ID NO: 1285 - RNA, 21 nt, synthetic construct
  source 1..21: mol_type = other RNA
agcagaagcgagagcccccag

SEQ ID NO: 1286 - RNA, 21 nt, synthetic construct
  source 1..21: mol_type = other RNA
ggcctgcacgaccaaggaatg

SEQ ID NO: 1287 - RNA, 21 nt, synthetic construct
  source 1..21: mol_type = other RNA
tctgtgagcctaaccaaaaac

SEQ ID NO: 1288 - RNA, 21 nt, synthetic construct
  source 1..21: mol_type = other RNA
agggaacgtttcgacacaacc

SEQ ID NO: 1289 - RNA, 21 nt, synthetic construct
  source 1..21: mol_type = other RNA
ctggtccacggaaacgtcgcc

SEQ ID NO: 1290 - RNA, 21 nt, synthetic construct
  source 1..21: mol_type = other RNA
cctgtgagtagtgctaatctg

SEQ ID NO: 1291 - RNA, 21 nt, synthetic construct
  source 1..21: mol_type = other RNA
gcgcgtcattcggctgatggt

SEQ ID NO: 1292 - RNA, 21 nt, synthetic construct
  source 1..21: mol_type = other RNA
accggcctgagcggcaaggtg

SEQ ID NO: 1293 - RNA, 21 nt, synthetic construct
  source 1..21: mol_type = other RNA
gaccccatcaccaagaacatc

SEQ ID NO: 1294 - RNA, 21 nt, synthetic construct
  source 1..21: mol_type = other RNA
caggctactggtgggtcgtcg

SEQ ID NO: 1295 - RNA, 21 nt, synthetic construct
  source 1..21: mol_type = other RNA
atgaaccagaacaacacccag

SEQ ID NO: 1296 - RNA, 21 nt, synthetic construct
  source 1..21: mol_type = other RNA
aactacgactactcacggacc

SEQ ID NO: 1297 - RNA, 21 nt, synthetic construct
  source 1..21: mol_type = other RNA
gacctgagtaggcacactctg

SEQ ID NO: 1298 - RNA, 21 nt, synthetic construct
  source 1..21: mol_type = other RNA
atgaaagaaaccatgaaactt

SEQ ID NO: 1299 - RNA, 21 nt, synthetic construct
  source 1..21: mol_type = other RNA
gaacacgacgccagcatcaac

SEQ ID NO: 1300 - RNA, 21 nt, synthetic construct
  source 1..21: mol_type = other RNA
gaaatcgtcaacggcgggcga

SEQ ID NO: 1301 - RNA, 21 nt, synthetic construct
  source 1..21: mol_type = other RNA
ggaacccttccaaacaccgca

SEQ ID NO: 1302 - RNA, 21 nt, synthetic construct
  source 1..21: mol_type = other RNA
ggtaacgaagacaaccaacac

SEQ ID NO: 1303 - RNA, 21 nt, synthetic construct
  source 1..21: mol_type = other RNA
gtgagagccaccggcacccac

SEQ ID NO: 1304 - RNA, 21 nt, synthetic construct
  source 1..21: mol_type = other RNA
atgattagtcgtgttactact

SEQ ID NO: 1305 - RNA, 21 nt, synthetic construct
  source 1..21: mol_type = other RNA
ggcgagagaaagggccacgag

SEQ ID NO: 1306 - RNA, 21 nt, synthetic construct
  source 1..21: mol_type = other RNA
gttatcggtgcccactccgtc

SEQ ID NO: 1307 - RNA, 21 nt, synthetic construct
  source 1..21: mol_type = other RNA
acctcatccccgccagtgaac

SEQ ID NO: 1308 - RNA, 21 nt, synthetic construct
  source 1..21: mol_type = other RNA
agcaacgtggacatcaagctg

SEQ ID NO: 1309 - RNA, 21 nt, synthetic construct
  source 1..21: mol_type = other RNA
gcaaaatacaacgaaaccttg

SEQ ID NO: 1310 - RNA, 21 nt, synthetic construct
  source 1..21: mol_type = other RNA
ggcctgggcggcacccgcgac

SEQ ID NO: 1311 - RNA, 21 nt, synthetic construct
  source 1..21: mol_type = other RNA
ggcgaaagtgcctccgtgcaa

SEQ ID NO: 1312 - RNA, 21 nt, synthetic construct
  source 1..21: mol_type = other RNA
agccgaagtgaatctctccaa

SEQ ID NO: 1313 - RNA, 21 nt, synthetic construct
  source 1..21: mol_type = other RNA
agcgaatccaaactcctcgca

SEQ ID NO: 1314 - RNA, 21 nt, synthetic construct
  source 1..21: mol_type = other RNA
aacgtggtgagcagcgccatg

SEQ ID NO: 1315 - RNA, 21 nt, synthetic construct
  source 1..21: mol_type = other RNA
gccaaggcccccgtgaccggc

SEQ ID NO: 1316 - RNA, 21 nt, synthetic construct
  source 1..21: mol_type = other RNA
gacgtcgaatacccgggcaaa

SEQ ID NO: 1317 - RNA, 21 nt, synthetic construct
  source 1..21: mol_type = other RNA
aaccacaacgggggcctccaa

SEQ ID NO: 1318 - RNA, 21 nt, synthetic construct
  source 1..21: mol_type = other RNA
gacgtcgaaaacccaggaaac

SEQ ID NO: 1319 - RNA, 21 nt, synthetic construct
  source 1..21: mol_type = other RNA
catgttgggtcgtctactgtt

SEQ ID NO: 1320 - RNA, 21 nt, synthetic construct
  source 1..21: mol_type = other RNA
aaggtggtgaccagcgccatg

SEQ ID NO: 1321 - RNA, 21 nt, synthetic construct
  source 1..21: mol_type = other RNA
gagagagacggctacaagctg

SEQ ID NO: 1322 - RNA, 21 nt, synthetic construct
  source 1..21: mol_type = other RNA
tcactggttcaaaacgttatt

SEQ ID NO: 1323 - RNA, 21 nt, synthetic construct
  source 1..21: mol_type = other RNA
tccggtagtcaaaacacacga

SEQ ID NO: 1324 - RNA, 21 nt, synthetic construct
  source 1..21: mol_type = other RNA
ggccaggccagagtgcccatc

SEQ ID NO: 1325 - RNA, 21 nt, synthetic construct
  source 1..21: mol_type = other RNA
gctaaggcgccggagaatggg

SEQ ID NO: 1326 - RNA, 21 nt, synthetic construct
  source 1..21: mol_type = other RNA
agcggactttcagtaaaagtt

SEQ ID NO: 1327 - RNA, 21 nt, synthetic construct
  source 1..21: mol_type = other RNA
aaagccatggacggcatcata

SEQ ID NO: 1328 - RNA, 21 nt, synthetic construct
  source 1..21: mol_type = other RNA
gttgttgcggttgcgtcgagt

SEQ ID NO: 1329 - RNA, 21 nt, synthetic construct
  source 1..21: mol_type = other RNA
caacgcaccacctcaggcggc

SEQ ID NO: 1330 - RNA, 21 nt, synthetic construct
  source 1..21: mol_type = other RNA
gtcagcgcaaccaactccatc

SEQ ID NO: 1331 - RNA, 21 nt, synthetic construct
  source 1..21: mol_type = other RNA
aagtggactgataatcttgag

SEQ ID NO: 1332 - RNA, 21 nt, synthetic construct
  source 1..21: mol_type = other RNA
aaagacacacaaaacctcata

SEQ ID NO: 1333 - RNA, 21 nt, synthetic construct
  source 1..21: mol_type = other RNA
aaacacatcaaagacggaact

SEQ ID NO: 1334 - RNA, 21 nt, synthetic construct
  source 1..21: mol_type = other RNA
gccagacacagcgccgacggc

SEQ ID NO: 1335 - RNA, 21 nt, synthetic construct
  source 1..21: mol_type = other RNA
ggttatgatcataagagttct

SEQ ID NO: 1336 - RNA, 21 nt, synthetic construct
  source 1..21: mol_type = other RNA
catgggtcttatgggggtgag

SEQ ID NO: 1337 - RNA, 21 nt, synthetic construct
  source 1..21: mol_type = other RNA
gactacttgtcccgcggggtg

SEQ ID NO: 1338 - RNA, 21 nt, synthetic construct
  source 1..21: mol_type = other RNA
gtggcctacaagagcctgagc

SEQ ID NO: 1339 - RNA, 21 nt, synthetic construct
  source 1..21: mol_type = other RNA
gagaagaactaccccctgcac

SEQ ID NO: 1340 - RNA, 21 nt, synthetic construct
  source 1..21: mol_type = other RNA
atgaatagtgctaaggtgccg

SEQ ID NO: 1341 - RNA, 21 nt, synthetic construct
  source 1..21: mol_type = other RNA
aacatcatgataaacagcgtg

SEQ ID NO: 1342 - RNA, 21 nt, synthetic construct
  source 1..21: mol_type = other RNA
aagaaggatgtgatgaatctt

SEQ ID NO: 1343 - DNA, 21 bp, synthetic construct
  source 1..21: mol_type = other DNA
aaatcagacggagtcgcgggg

SEQ ID NO: 1344 - RNA, 21 nt, synthetic construct
  source 1..21: mol_type = other RNA
gattttctgagtcggggtatt

SEQ ID NO: 1345 - RNA, 21 nt, synthetic construct
  source 1..21: mol_type = other RNA
ggccccgccgtgaagaccagc

SEQ ID NO: 1346 - RNA, 21 nt, synthetic construct
  source 1..21: mol_type = other RNA
agcgtgagcctgaccagaatc

SEQ ID NO: 1347 - RNA, 21 nt, synthetic construct
  source 1..21: mol_type = other RNA
gccagcagcgtgggccagaag

SEQ ID NO: 1348 - RNA, 21 nt, synthetic construct
  source 1..21: mol_type = other RNA
atggaaaacggcgctgacaaa

SEQ ID NO: 1349 - RNA, 21 nt, synthetic construct
  source 1..21: mol_type = other RNA
acaggaaaagaaatcgaactc

SEQ ID NO: 1350 - RNA, 21 nt, synthetic construct
  source 1..21: mol_type = other RNA
caaacatcctcagaggcaaga

SEQ ID NO: 1351 - RNA, 21 nt, synthetic construct
  source 1..21: mol_type = other RNA
gccagacacaacgagaccacc

SEQ ID NO: 1352 - RNA, 21 nt, synthetic construct
  source 1..21: mol_type = other RNA
ctgcattatttgtctactgcg

SEQ ID NO: 1353 - RNA, 21 nt, synthetic construct
  source 1..21: mol_type = other RNA
aacgccatcaacaggatggtg

SEQ ID NO: 1354 - RNA, 21 nt, synthetic construct
  source 1..21: mol_type = other RNA
atgaactccaccaaagtaacc

SEQ ID NO: 1355 - RNA, 21 nt, synthetic construct
  source 1..21: mol_type = other RNA
ggcagcctgaccgagacccag

SEQ ID NO: 1356 - RNA, 21 nt, synthetic construct
  source 1..21: mol_type = other RNA
tctatggtcaaaaacgtcgac

SEQ ID NO: 1357 - RNA, 21 nt, synthetic construct
  source 1..21: mol_type = other RNA
gtgagctacaaggccctgagc

SEQ ID NO: 1358 - RNA, 21 nt, synthetic construct
  source 1..21: mol_type = other RNA
atgaaagaaaaaatgatgttc

SEQ ID NO: 1359 - RNA, 21 nt, synthetic construct
  source 1..21: mol_type = other RNA
cccagagtggacgtgaacagc

SEQ ID NO: 1360 - RNA, 21 nt, synthetic construct
  source 1..21: mol_type = other RNA
aagtggactgttaatattgag

SEQ ID NO: 1361 - RNA, 21 nt, synthetic construct
  source 1..21: mol_type = other RNA
gagcagaaggggcttttgatt

SEQ ID NO: 1362 - RNA, 21 nt, synthetic construct
  source 1..21: mol_type = other RNA
catggtcagccggcgatggtt

SEQ ID NO: 1363 - RNA, 21 nt, synthetic construct
  source 1..21: mol_type = other RNA
ccgtataatgttcctagttct

SEQ ID NO: 1364 - RNA, 21 nt, synthetic construct
  source 1..21: mol_type = other RNA
gagacgttgcctaatatggct

SEQ ID NO: 1365 - RNA, 21 nt, synthetic construct
  source 1..21: mol_type = other RNA
gccctcacaggtatcaaactg

SEQ ID NO: 1366 - RNA, 21 nt, synthetic construct
  source 1..21: mol_type = other RNA
cgtcttgggggtactcgtgag

SEQ ID NO: 1367 - RNA, 21 nt, synthetic construct
  source 1..21: mol_type = other RNA
ccgggtagttacggcggagac

SEQ ID NO: 1368 - RNA, 21 nt, synthetic construct
  source 1..21: mol_type = other RNA
caggttgggtcgcctactgtt

SEQ ID NO: 1369 - RNA, 21 nt, synthetic construct
  source 1..21: mol_type = other RNA
ggagaacggaaattccacgaa

SEQ ID NO: 1370 - RNA, 21 nt, synthetic construct
  source 1..21: mol_type = other RNA
gttatagcctcatacgcagac

SEQ ID NO: 1371 - RNA, 21 nt, synthetic construct
  source 1..21: mol_type = other RNA
gccagaaacgagagcgagggc

SEQ ID NO: 1372 - RNA, 21 nt, synthetic construct
  source 1..21: mol_type = other RNA
gtgattaaggatagggtgttg

SEQ ID NO: 1373 - RNA, 21 nt, synthetic construct
  source 1..21: mol_type = other RNA
ggcagcctgatcgagacccac

SEQ ID NO: 1374 - RNA, 21 nt, synthetic construct
  source 1..21: mol_type = other RNA
atgaacagcgccaaggtgccc

SEQ ID NO: 1375 - RNA, 21 nt, synthetic construct
  source 1..21: mol_type = other RNA
agcggcgccatgggcgccctg

SEQ ID NO: 1376 - RNA, 21 nt, synthetic construct
  source 1..21: mol_type = other RNA
cagcagggcatcagcagcagc

SEQ ID NO: 1377 - RNA, 21 nt, synthetic construct
  source 1..21: mol_type = other RNA
ggaaacaaactgcagatggac

SEQ ID NO: 1378 - RNA, 21 nt, synthetic construct
  source 1..21: mol_type = other RNA
caactctcgacaacctctatg

SEQ ID NO: 1379 - RNA, 21 nt, synthetic construct
  source 1..21: mol_type = other RNA
agtggtttgggtaataatagt

SEQ ID NO: 1380 - RNA, 21 nt, synthetic construct
  source 1..21: mol_type = other RNA
acctcacccaacgactcagaa

SEQ ID NO: 1381 - RNA, 21 nt, synthetic construct
  source 1..21: mol_type = other RNA
ctgggcacctctagagtttcc

SEQ ID NO: 1382 - RNA, 21 nt, synthetic construct
  source 1..21: mol_type = other RNA
gaaatcaaaccaatccaaagg

SEQ ID NO: 1383 - RNA, 21 nt, synthetic construct
  source 1..21: mol_type = other RNA
ctgatgaacggaatcacaaac

SEQ ID NO: 1384 - RNA, 21 nt, synthetic construct
  source 1..21: mol_type = other RNA
gccagccccaacaacagcgag

SEQ ID NO: 1385 - RNA, 21 nt, synthetic construct
  source 1..21: mol_type = other RNA
agaatcggcatggagctggcc

SEQ ID NO: 1386 - RNA, 21 nt, synthetic construct
  source 1..21: mol_type = other RNA
ggcctgcaattagacgtctcc

SEQ ID NO: 1387 - RNA, 21 nt, synthetic construct
  source 1..21: mol_type = other RNA
gtgccccaggcccaggccaag

SEQ ID NO: 1388 - RNA, 21 nt, synthetic construct
  source 1..21: mol_type = other RNA
aaagaccccagaagcgcagtc

SEQ ID NO: 1389 - RNA, 21 nt, synthetic construct
  source 1..21: mol_type = other RNA
aagatcggcctgatcagcgcc

SEQ ID NO: 1390 - RNA, 21 nt, synthetic construct
  source 1..21: mol_type = other RNA
ggtagtaatatggcgactcat

SEQ ID NO: 1391 - RNA, 21 nt, synthetic construct
  source 1..21: mol_type = other RNA
ggggtatccgacatggtgcaa

SEQ ID NO: 1392 - RNA, 21 nt, synthetic construct
  source 1..21: mol_type = other RNA
gcttttggtgctcttaagatg

SEQ ID NO: 1393 - RNA, 21 nt, synthetic construct
  source 1..21: mol_type = other RNA
aatgttctgtctagtgctatg

SEQ ID NO: 1394 - RNA, 21 nt, synthetic construct
  source 1..21: mol_type = other RNA
ggcaacggcaccagaaacacc

SEQ ID NO: 1395 - RNA, 21 nt, synthetic construct
  source 1..21: mol_type = other RNA
ctggttgaccaaaactccgtc

SEQ ID NO: 1396 - DNA, 21 bp, synthetic construct
  source 1..21: mol_type = other DNA
gtaaacatcggcaacggcttc

SEQ ID NO: 1397 - RNA, 21 nt, synthetic construct
  source 1..21: mol_type = other RNA
gtgaccaaggtggacagcgtg

SEQ ID NO: 1398 - RNA, 21 nt, synthetic construct
  source 1..21: mol_type = other RNA
accaaattcagcggcaccatc

SEQ ID NO: 1399 - RNA, 21 nt, synthetic construct
  source 1..21: mol_type = other RNA
gactccaaagtgcggatggac

SEQ ID NO: 1400 - RNA, 21 nt, synthetic construct
  source 1..21: mol_type = other RNA
ggaatggccatagtgcaaaac

SEQ ID NO: 1401 - RNA, 21 nt, synthetic construct
  source 1..21: mol_type = other RNA
cccaacaacctgcccaccagc

SEQ ID NO: 1402 - RNA, 21 nt, synthetic construct
  source 1..21: mol_type = other RNA
ttgagggagcgtgatgtgtat

SEQ ID NO: 1403 - RNA, 21 nt, synthetic construct
  source 1..21: mol_type = other RNA
ccccctaggtcagaagtgatg

SEQ ID NO: 1404 - RNA, 21 nt, synthetic construct
  source 1..21: mol_type = other RNA
ggatacggcgacaaccaacac

SEQ ID NO: 1405 - RNA, 21 nt, synthetic construct
  source 1..21: mol_type = other RNA
agaagagacgacaccatcttc

SEQ ID NO: 1406 - RNA, 21 nt, synthetic construct
  source 1..21: mol_type = other RNA
gcgatgaatgtgattgagggt

SEQ ID NO: 1407 - RNA, 21 nt, synthetic construct
  source 1..21: mol_type = other RNA
aacaacacagaaggcacaaga

SEQ ID NO: 1408 - RNA, 21 nt, synthetic construct
  source 1..21: mol_type = other RNA
atgattcaggctccggctatg

SEQ ID NO: 1409 - RNA, 21 nt, synthetic construct
  source 1..21: mol_type = other RNA
gccgcctacaaagcactttct

SEQ ID NO: 1410 - RNA, 21 nt, synthetic construct
  source 1..21: mol_type = other RNA
acagaacccgccgtcagtgtc

SEQ ID NO: 1411 - RNA, 21 nt, synthetic construct
  source 1..21: mol_type = other RNA
cccggcagcagcaaggtgagc

SEQ ID NO: 1412 - RNA, 21 nt, synthetic construct
  source 1..21: mol_type = other RNA
ctcaccaaaggggactctgtt

SEQ ID NO: 1413 - DNA, 21 bp, synthetic construct
  source 1..21: mol_type = other DNA
ggcatcatgagaacccagatg

SEQ ID NO: 1414 - RNA, 21 nt, synthetic construct
  source 1..21: mol_type = other RNA
gacaaggacggcgtggccgcc

SEQ ID NO: 1415 - RNA, 21 nt, synthetic construct
  source 1..21: mol_type = other RNA
tctgggctgggcaacaactca

SEQ ID NO: 1416 - RNA, 21 nt, synthetic construct
  source 1..21: mol_type = other RNA
ggcatgcacaacgagaccacc

SEQ ID NO: 1417 - RNA, 21 nt, synthetic construct
  source 1..21: mol_type = other RNA
aatgagaatcagcagcagcgg

SEQ ID NO: 1418 - RNA, 21 nt, synthetic construct
  source 1..21: mol_type = other RNA
ggcctcctgtcaggcctggtg

SEQ ID NO: 1419 - RNA, 21 nt, synthetic construct
  source 1..21: mol_type = other RNA
aagtggaccctgaacctggag

SEQ ID NO: 1420 - RNA, 21 nt, synthetic construct
  source 1..21: mol_type = other RNA
tcgatggtccaaaacgttgag

SEQ ID NO: 1421 - RNA, 21 nt, synthetic construct
  source 1..21: mol_type = other RNA
gcgaaatacaacggctcactt

SEQ ID NO: 1422 - RNA, 21 nt, synthetic construct
  source 1..21: mol_type = other RNA
gataagaatgaggcgaagggg

SEQ ID NO: 1423 - RNA, 21 nt, synthetic construct
  source 1..21: mol_type = other RNA
caagtgctcaaaaacggcgct

SEQ ID NO: 1424 - RNA, 21 nt, synthetic construct
  source 1..21: mol_type = other RNA
aaggctgagttgaatcgggtt

SEQ ID NO: 1425 - RNA, 21 nt, synthetic construct
  source 1..21: mol_type = other RNA
aagaaggagcccatgatgatg

SEQ ID NO: 1426 - RNA, 21 nt, synthetic construct
  source 1..21: mol_type = other RNA
cacgacaagagcaccgagacc

SEQ ID NO: 1427 - RNA, 21 nt, synthetic construct
  source 1..21: mol_type = other RNA
acgtcgcggaataatagtgag

SEQ ID NO: 1428 - RNA, 21 nt, synthetic construct
  source 1..21: mol_type = other RNA
aagagtgttagttatcagtat

SEQ ID NO: 1429 - RNA, 21 nt, synthetic construct
  source 1..21: mol_type = other RNA
ccgggcttgtcacaccaaatg

SEQ ID NO: 1430 - RNA, 21 nt, synthetic construct
  source 1..21: mol_type = other RNA
gagaagaaccccaccgtgatg

SEQ ID NO: 1431 - RNA, 21 nt, synthetic construct
  source 1..21: mol_type = other RNA
ttgacaaaagtggacaccgtc

SEQ ID NO: 1432 - RNA, 21 nt, synthetic construct
  source 1..21: mol_type = other RNA
ccgcagaatactaagattgat

SEQ ID NO: 1433 - RNA, 21 nt, synthetic construct
  source 1..21: mol_type = other RNA
caggggaggggtcttattggg

SEQ ID NO: 1434 - RNA, 21 nt, synthetic construct
  source 1..21: mol_type = other RNA
gctcatgagaggggtctgttg

SEQ ID NO: 1435 - RNA, 21 nt, synthetic construct
  source 1..21: mol_type = other RNA
cgtttcgaacaagtttcaaac

SEQ ID NO: 1436 - RNA, 21 nt, synthetic construct
  source 1..21: mol_type = other RNA
ggtagtaatttgccgactcct

SEQ ID NO: 1437 - RNA, 21 nt, synthetic construct
  source 1..21: mol_type = other RNA
attagtgagaagatttcgagg

SEQ ID NO: 1438 - RNA, 21 nt, synthetic construct
  source 1..21: mol_type = other RNA
agcctggtgcagaacgtggtg

SEQ ID NO: 1439 - RNA, 21 nt, synthetic construct
  source 1..21: mol_type = other RNA
gcgacgcgtcttagtgcgggg

SEQ ID NO: 1440 - RNA, 21 nt, synthetic construct
  source 1..21: mol_type = other RNA
agtggtgtgatgggtgggttg

SEQ ID NO: 1441 - RNA, 21 nt, synthetic construct
  source 1..21: mol_type = other RNA
ggttttatgtctaagatttcg

SEQ ID NO: 1442 - RNA, 21 nt, synthetic construct
  source 1..21: mol_type = other RNA
acgaatcaacaggttattatg

SEQ ID NO: 1443 - RNA, 21 nt, synthetic construct
  source 1..21: mol_type = other RNA
aacagagaggactacaagcag

SEQ ID NO: 1444 - RNA, 21 nt, synthetic construct
  source 1..21: mol_type = other RNA
ggagtataccaagacatgcga

SEQ ID NO: 1445 - RNA, 21 nt, synthetic construct
  source 1..21: mol_type = other RNA
aatgagaatgagcagcggcgg

SEQ ID NO: 1446 - RNA, 21 nt, synthetic construct
  source 1..21: mol_type = other RNA
gtagcctacaaagccccctct

SEQ ID NO: 1447 - RNA, 21 nt, synthetic construct
  source 1..21: mol_type = other RNA
ggcgtgagcgacagagtgcac

SEQ ID NO: 1448 - RNA, 21 nt, synthetic construct
  source 1..21: mol_type = other RNA
cccaccagaggcaagaacgtg

SEQ ID NO: 1449 - RNA, 21 nt, synthetic construct
  source 1..21: mol_type = other RNA
acctcacccaacaactctgtc

SEQ ID NO: 1450 - RNA, 21 nt, synthetic construct
  source 1..21: mol_type = other RNA
agtaggccggagagttcgcag

SEQ ID NO: 1451 - RNA, 21 nt, synthetic construct
  source 1..21: mol_type = other RNA
agcggcgccatcggcggcctg

SEQ ID NO: 1452 - RNA, 21 nt, synthetic construct
  source 1..21: mol_type = other RNA
aatattcagcggaatacgctg

SEQ ID NO: 1453 - DNA, 21 bp, synthetic construct
  source 1..21: mol_type = other DNA
aaagtcacaggtggagactac

SEQ ID NO: 1454 - RNA, 21 nt, synthetic construct
  source 1..21: mol_type = other RNA
agtctgggaaccgagttccac

SEQ ID NO: 1455 - RNA, 21 nt, synthetic construct
  source 1..21: mol_type = other RNA
aaggagaacggcgtggacaag

SEQ ID NO: 1456 - RNA, 21 nt, synthetic construct
  source 1..21: mol_type = other RNA
agaaaggacctgctgatgggc

SEQ ID NO: 1457 - RNA, 21 nt, synthetic construct
  source 1..21: mol_type = other RNA
tctgagagtcggccggcggat

SEQ ID NO: 1458 - RNA, 21 nt, synthetic construct
  source 1..21: mol_type = other RNA
agaatcggcatggcccaggcc

SEQ ID NO: 1459 - RNA, 21 nt, synthetic construct
  source 1..21: mol_type = other RNA
ttaagcaaagtacggatggac

SEQ ID NO: 1460 - RNA, 21 nt, synthetic construct
  source 1..21: mol_type = other RNA
caagttgacagcggccccgca

SEQ ID NO: 1461 - RNA, 21 nt, synthetic construct
  source 1..21: mol_type = other RNA
gccagccaggagcagaccaga

SEQ ID NO: 1462 - RNA, 21 nt, synthetic construct
  source 1..21: mol_type = other RNA
tcgctggtacaaaacgtcgcg

SEQ ID NO: 1463 - RNA, 21 nt, synthetic construct
  source 1..21: mol_type = other RNA
cggcttgttcatactatggaa

SEQ ID NO: 1464 - RNA, 21 nt, synthetic construct
  source 1..21: mol_type = other RNA
ggcaccaacagcgagatggag

SEQ ID NO: 1465 - RNA, 21 nt, synthetic construct
  source 1..21: mol_type = other RNA
ggccgcgcatacgcacacaac

SEQ ID NO: 1466 - RNA, 21 nt, synthetic construct
  source 1..21: mol_type = other RNA
gacgtgccggttatcaggaac

SEQ ID NO: 1467 - RNA, 21 nt, synthetic construct
  source 1..21: mol_type = other RNA
caaatcggcagcagtacagtg

SEQ ID NO: 1468 - RNA, 21 nt, synthetic construct
  source 1..21: mol_type = other RNA
atgaaggagaccctgatgctg

SEQ ID NO: 1469 - RNA, 21 nt, synthetic construct
  source 1..21: mol_type = other RNA
gcgagtcaggagtcgtctcgt

SEQ ID NO: 1470 - RNA, 21 nt, synthetic construct
  source 1..21: mol_type = other RNA
cttaatgtgactgggcttacg

SEQ ID NO: 1471 - DNA, 21 bp, synthetic construct
  source 1..21: mol_type = other DNA
ctgctgaacggcatcaccaac

SEQ ID NO: 1472 - RNA, 21 nt, synthetic construct
  source 1..21: mol_type = other RNA
gggctgctacaaaaaatgatg

SEQ ID NO: 1473 - RNA, 21 nt, synthetic construct
  source 1..21: mol_type = other RNA
actattaatccgtcgagtagt

SEQ ID NO: 1474 - RNA, 21 nt, synthetic construct
  source 1..21: mol_type = other RNA
ggcaacgaagacaaccaacag

SEQ ID NO: 1475 - RNA, 21 nt, synthetic construct
  source 1..21: mol_type = other RNA
ctgactaaggttgatagtgcg

SEQ ID NO: 1476 - RNA, 21 nt, synthetic construct
  source 1..21: mol_type = other RNA
ggcagcagagccgaggacatg

SEQ ID NO: 1477 - RNA, 21 nt, synthetic construct
  source 1..21: mol_type = other RNA
gcgggagaaagaaaccaagta

SEQ ID NO: 1478 - RNA, 21 nt, synthetic construct
  source 1..21: mol_type = other RNA
aggtcgccgaataatagtgag

SEQ ID NO: 1479 - RNA, 21 nt, synthetic construct
  source 1..21: mol_type = other RNA
ttcatcaacaacctgcagatg

SEQ ID NO: 1480 - RNA, 21 nt, synthetic construct
  source 1..21: mol_type = other RNA
ggtgtgtatcagaatatgagt

SEQ ID NO: 1481 - RNA, 21 nt, synthetic construct
  source 1..21: mol_type = other RNA
atgatcgaggcccccgccgtg

SEQ ID NO: 1482 - RNA, 21 nt, synthetic construct
  source 1..21: mol_type = other RNA
gactacctgagcagaggcatc

SEQ ID NO: 1483 - RNA, 21 nt, synthetic construct
  source 1..21: mol_type = other RNA
ggcagacacaacgagaccccc

SEQ ID NO: 1484 - RNA, 21 nt, synthetic construct
  source 1..21: mol_type = other RNA
caggttgggtcgtctactgct

SEQ ID NO: 1485 - RNA, 21 nt, synthetic construct
  source 1..21: mol_type = other RNA
gtgattaaggatagggtgttc

SEQ ID NO: 1486 - DNA, 21 bp, synthetic construct
  source 1..21: mol_type = other DNA
ccctacaaccacccaagctcc

SEQ ID NO: 1487 - RNA, 21 nt, synthetic construct
  source 1..21: mol_type = other RNA
gcgaatattgagattgctgtg

SEQ ID NO: 1488 - RNA, 21 nt, synthetic construct
  source 1..21: mol_type = other RNA
gagaagagccccgccgtgatg

SEQ ID NO: 1489 - RNA, 21 nt, synthetic construct
  source 1..21: mol_type = other RNA
ggcggcgccggccagaacgac

SEQ ID NO: 1490 - RNA, 21 nt, synthetic construct
  source 1..21: mol_type = other RNA
gtgaaaatctacggcgccttc

SEQ ID NO: 1491 - RNA, 21 nt, synthetic construct
  source 1..21: mol_type = other RNA
agtattagtgataattctggg

SEQ ID NO: 1492 - RNA, 21 nt, synthetic construct
  source 1..21: mol_type = other RNA
cagaagagcagcgacgccaga

SEQ ID NO: 1493 - RNA, 21 nt, synthetic construct
  source 1..21: mol_type = other RNA
ggactctcacaaaaaatgacc

SEQ ID NO: 1494 - RNA, 21 nt, synthetic construct
  source 1..21: mol_type = other RNA
aacaacagcgaaggagcaagg

SEQ ID NO: 1495 - RNA, 21 nt, synthetic construct
  source 1..21: mol_type = other RNA
gctaaggcgacggagactggg

SEQ ID NO: 1496 - RNA, 21 nt, synthetic construct
  source 1..21: mol_type = other RNA
gcgagtctggagccgtctcgt

SEQ ID NO: 1497 - RNA, 21 nt, synthetic construct
  source 1..21: mol_type = other RNA
gccgccaccggcatcaagctg

SEQ ID NO: 1498 - RNA, 21 nt, synthetic construct
  source 1..21: mol_type = other RNA
aacagagaggacaacaaccac

SEQ ID NO: 1499 - RNA, 21 nt, synthetic construct
  source 1..21: mol_type = other RNA
cttacgcggggtgagaatgtg

SEQ ID NO: 1500 - RNA, 21 nt, synthetic construct
  source 1..21: mol_type = other RNA
cccaccagactgagcgagggc

SEQ ID NO: 1501 - RNA, 21 nt, synthetic construct
  source 1..21: mol_type = other RNA
aacaagaacgccgccaccggc

SEQ ID NO: 1502 - RNA, 21 nt, synthetic construct
  source 1..21: mol_type = other RNA
aacaactcggaaggcaacaga

SEQ ID NO: 1503 - RNA, 21 nt, synthetic construct
  source 1..21: mol_type = other RNA
aagagccaccaggtgatcatg

SEQ ID NO: 1504 - RNA, 21 nt, synthetic construct
  source 1..21: mol_type = other RNA
ggcgtggagaaccccggcaag

SEQ ID NO: 1505 - RNA, 21 nt, synthetic construct
  source 1..21: mol_type = other RNA
agcagcaagcccgccacctac

SEQ ID NO: 1506 - RNA, 21 nt, synthetic construct
  source 1..21: mol_type = other RNA
gaggccaaggtgtacagcctg

SEQ ID NO: 1507 - RNA, 21 nt, synthetic construct
  source 1..21: mol_type = other RNA
tcacaaatcaacactagggaa

SEQ ID NO: 1508 - RNA, 21 nt, synthetic construct
  source 1..21: mol_type = other RNA
agcttaaacgggatggttctg

SEQ ID NO: 1509 - RNA, 21 nt, synthetic construct
  source 1..21: mol_type = other RNA
ccagaaaacaacaaaatcgac

SEQ ID NO: 1510 - RNA, 21 nt, synthetic construct
  source 1..21: mol_type = other RNA
gacgtggagaaccccggccag

SEQ ID NO: 1511 - RNA, 21 nt, synthetic construct
  source 1..21: mol_type = other RNA
gagtctgaggtgaagcgggag

SEQ ID NO: 1512 - RNA, 21 nt, synthetic construct
  source 1..21: mol_type = other RNA
aatggtaaggggattgagttg

SEQ ID NO: 1513 - RNA, 21 nt, synthetic construct
  source 1..21: mol_type = other RNA
ggtaacatgcaaacacaaaac

SEQ ID NO: 1514 - RNA, 21 nt, synthetic construct
  source 1..21: mol_type = other RNA
gaaatatacaacacagctctg

SEQ ID NO: 1515 - RNA, 21 nt, synthetic construct
  source 1..21: mol_type = other RNA
acaatccaccaagtcatagtc

SEQ ID NO: 1516 - RNA, 21 nt, synthetic construct
  source 1..21: mol_type = other RNA
agggccagagaagaacacatg

SEQ ID NO: 1517 - RNA, 21 nt, synthetic construct
  source 1..21: mol_type = other RNA
tccgactccaaacaactcgcc

SEQ ID NO: 1518 - RNA, 21 nt, synthetic construct
  source 1..21: mol_type = other RNA
ggtaagcagggggagattccg

SEQ ID NO: 1519 - RNA, 21 nt, synthetic construct
  source 1..21: mol_type = other RNA
cccggcagagagacccccacc

SEQ ID NO: 1520 - RNA, 21 nt, synthetic construct
  source 1..21: mol_type = other RNA
agtggtgggaataatagtgtt

SEQ ID NO: 1521 - RNA, 21 nt, synthetic construct
  source 1..21: mol_type = other RNA
aggacctctaactctgacgtg

SEQ ID NO: 1522 - RNA, 21 nt, synthetic construct
  source 1..21: mol_type = other RNA
gacatcagtgctaaacacgaa

SEQ ID NO: 1523 - RNA, 21 nt, synthetic construct
  source 1..21: mol_type = other RNA
gggtatgggtcgtctgggaat

SEQ ID NO: 1524 - RNA, 21 nt, synthetic construct
  source 1..21: mol_type = other RNA
aacggacaaggggtctcagtg

SEQ ID NO: 1525 - RNA, 21 nt, synthetic construct
  source 1..21: mol_type = other RNA
gagaaggtggtgaaggagtcg

SEQ ID NO: 1526 - RNA, 21 nt, synthetic construct
  source 1..21: mol_type = other RNA
ggaactaactcagaattagtc

SEQ ID NO: 1527 - RNA, 21 nt, synthetic construct
  source 1..21: mol_type = other RNA
ctgagagacggcgacaccccc

SEQ ID NO: 1528 - RNA, 21 nt, synthetic construct
  source 1..21: mol_type = other RNA
gccgacgagagaggccagctg

SEQ ID NO: 1529 - RNA, 21 nt, synthetic construct
  source 1..21: mol_type = other RNA
ccctacaacaaccccagcagc

SEQ ID NO: 1530 - RNA, 21 nt, synthetic construct
  source 1..21: mol_type = other RNA
gtggggagtgagagagcgatt

SEQ ID NO: 1531 - RNA, 21 nt, synthetic construct
  source 1..21: mol_type = other RNA
agcgtgaccgcagggcgttta

SEQ ID NO: 1532 - RNA, 21 nt, synthetic construct
  source 1..21: mol_type = other RNA
aatacttcggtggggaagagt

SEQ ID NO: 1533 - RNA, 21 nt, synthetic construct
  source 1..21: mol_type = other RNA
cgtactagtaatagtaatatt

SEQ ID NO: 1534 - RNA, 21 nt, synthetic construct
  source 1..21: mol_type = other RNA
tacctgaagatcaacaacatg

SEQ ID NO: 1535 - RNA, 21 nt, synthetic construct
  source 1..21: mol_type = other RNA
aaagacccagggtccgtcgta

SEQ ID NO: 1536 - RNA, 21 nt, synthetic construct
  source 1..21: mol_type = other RNA
agcatgaacggcatcagcaac

SEQ ID NO: 1537 - RNA, 21 nt, synthetic construct
  source 1..21: mol_type = other RNA
gaaaaagggccacacaacgcc

SEQ ID NO: 1538 - RNA, 21 nt, synthetic construct
  source 1..21: mol_type = other RNA
ggcgtcgacaaccccgaccgc

SEQ ID NO: 1539 - RNA, 21 nt, synthetic construct
  source 1..21: mol_type = other RNA
atgtctcagaagacgtctttg

SEQ ID NO: 1540 - RNA, 21 nt, synthetic construct
  source 1..21: mol_type = other RNA
atggacaccaagcacctgatc

SEQ ID NO: 1541 - RNA, 21 nt, synthetic construct
  source 1..21: mol_type = other RNA
agtactattgaggtgtctgtt

SEQ ID NO: 1542 - RNA, 21 nt, synthetic construct
  source 1..21: mol_type = other RNA
gtggtgaaccacaccgagatc

SEQ ID NO: 1543 - RNA, 21 nt, synthetic construct
  source 1..21: mol_type = other RNA
cctagtgttgatgttaatcgt

SEQ ID NO: 1544 - RNA, 21 nt, synthetic construct
  source 1..21: mol_type = other RNA
ccggatggtgttattttgatt

SEQ ID NO: 1545 - RNA, 21 nt, synthetic construct
  source 1..21: mol_type = other RNA
ccggagaaaactaagattgat

SEQ ID NO: 1546 - RNA, 21 nt, synthetic construct
  source 1..21: mol_type = other RNA
aagaaggagaccatcatcctg

SEQ ID NO: 1547 - RNA, 21 nt, synthetic construct
  source 1..21: mol_type = other RNA
aacagaggcgccgcctaccag

SEQ ID NO: 1548 - RNA, 21 nt, synthetic construct
  source 1..21: mol_type = other RNA
gcttcgcgtattgatacttct

SEQ ID NO: 1549 - RNA, 21 nt, synthetic construct
  source 1..21: mol_type = other RNA
ggcagacacaacgagagcacc

SEQ ID NO: 1550 - RNA, 21 nt, synthetic construct
  source 1..21: mol_type = other RNA
gtaacaataggcaacggcctc

SEQ ID NO: 1551 - RNA, 21 nt, synthetic construct
  source 1..21: mol_type = other RNA
gacaacaaagccaaacacgaa

SEQ ID NO: 1552 - RNA, 21 nt, synthetic construct
  source 1..21: mol_type = other RNA
gtttcgaatgttaggatggat

SEQ ID NO: 1553 - RNA, 21 nt, synthetic construct
  source 1..21: mol_type = other RNA
gtgcatgcttcggctgcgaat

SEQ ID NO: 1554 - RNA, 21 nt, synthetic construct
  source 1..21: mol_type = other RNA
aacgacttcggccacgtggtg

SEQ ID NO: 1555 - RNA, 21 nt, synthetic construct
  source 1..21: mol_type = other RNA
gggctctctcaaaaaatgatg

SEQ ID NO: 1556 - RNA, 21 nt, synthetic construct
  source 1..21: mol_type = other RNA
gtgagccccaactaccaggtg

SEQ ID NO: 1557 - RNA, 21 nt, synthetic construct
  source 1..21: mol_type = other RNA
aatcgtgaggattttaatcat

SEQ ID NO: 1558 - RNA, 21 nt, synthetic construct
  source 1..21: mol_type = other RNA
cgtgtggctatggaggtgcag

SEQ ID NO: 1559 - RNA, 21 nt, synthetic construct
  source 1..21: mol_type = other RNA
aaactcggccacaactacgag

SEQ ID NO: 1560 - RNA, 21 nt, synthetic construct
  source 1..21: mol_type = other RNA
agcggcggcagcgagggcaga

SEQ ID NO: 1561 - RNA, 21 nt, synthetic construct
  source 1..21: mol_type = other RNA
cggctcggacacaactacgac

SEQ ID NO: 1562 - RNA, 21 nt, synthetic construct
  source 1..21: mol_type = other RNA
cagagaggcgtgagcagcagc

SEQ ID NO: 1563 - RNA, 21 nt, synthetic construct
  source 1..21: mol_type = other RNA
gcctctcaagaaccctactcc

SEQ ID NO: 1564 - RNA, 21 nt, synthetic construct
  source 1..21: mol_type = other RNA
gtgaagatctacggcgccctg

SEQ ID NO: 1565 - RNA, 21 nt, synthetic construct
  source 1..21: mol_type = other RNA
gtgaccatcgtgaacggcatc

SEQ ID NO: 1566 - RNA, 21 nt, synthetic construct
  source 1..21: mol_type = other RNA
cttgtggatcagaaatctgtg

SEQ ID NO: 1567 - RNA, 21 nt, synthetic construct
  source 1..21: mol_type = other RNA
cagtttgcgagttatgctgct

SEQ ID NO: 1568 - RNA, 21 nt, synthetic construct
  source 1..21: mol_type = other RNA
caacgctccactagcggggta

SEQ ID NO: 1569 - RNA, 21 nt, synthetic construct
  source 1..21: mol_type = other RNA
ggctacggactcagcggtaac

SEQ ID NO: 1570 - RNA, 21 nt, synthetic construct
  source 1..21: mol_type = other RNA
gtccaaaaaggccacctcatc

SEQ ID NO: 1571 - RNA, 21 nt, synthetic construct
  source 1..21: mol_type = other RNA
ggtttggtgcagaatgtggat

SEQ ID NO: 1572 - RNA, 21 nt, synthetic construct
  source 1..21: mol_type = other RNA
agagtggaccagaacagcgtg

SEQ ID NO: 1573 - RNA, 21 nt, synthetic construct
  source 1..21: mol_type = other RNA
ctgcacctgaccgagaacaga

SEQ ID NO: 1574 - RNA, 21 nt, synthetic construct
  source 1..21: mol_type = other RNA
attgcggtggctacgaagtcg

SEQ ID NO: 1575 - RNA, 21 nt, synthetic construct
  source 1..21: mol_type = other RNA
ctgcacggcctgagcaccgcc

SEQ ID NO: 1576 - RNA, 21 nt, synthetic construct
  source 1..21: mol_type = other RNA
agttctaagcctgcgacttat

SEQ ID NO: 1577 - RNA, 21 nt, synthetic construct
  source 1..21: mol_type = other RNA
tatattgcgcctgcgatgagt

SEQ ID NO: 1578 - RNA, 21 nt, synthetic construct
  source 1..21: mol_type = other RNA
aatcataatggtgggactcag

SEQ ID NO: 1579 - RNA, 21 nt, synthetic construct
  source 1..21: mol_type = other RNA
ggtttgtatgatcagggtaag

SEQ ID NO: 1580 - RNA, 21 nt, synthetic construct
  source 1..21: mol_type = other RNA
ggttctttgaataatgctact

SEQ ID NO: 1581 - RNA, 21 nt, synthetic construct
  source 1..21: mol_type = other RNA
cagattcgtgctatggagatg

SEQ ID NO: 1582 - RNA, 21 nt, synthetic construct
  source 1..21: mol_type = other RNA
actatttctccgtcgagtagt

SEQ ID NO: 1583 - RNA, 21 nt, synthetic construct
  source 1..21: mol_type = other RNA
agggaacgagacgagaccaca

SEQ ID NO: 1584 - RNA, 21 nt, synthetic construct
  source 1..21: mol_type = other RNA
gtcaaggaacaagctgaaaga

SEQ ID NO: 1585 - RNA, 21 nt, synthetic construct
  source 1..21: mol_type = other RNA
gtgctgagccccaacaacgtg

SEQ ID NO: 1586 - RNA, 21 nt, synthetic construct
  source 1..21: mol_type = other RNA
gcggagcgtggtgtgacgtct

SEQ ID NO: 1587 - DNA, 21 bp, synthetic construct
  source 1..21: mol_type = other DNA
gtgaacgaaaaagccaaatca

SEQ ID NO: 1588 - DNA, 21 bp, synthetic construct
  source 1..21: mol_type = other DNA
ccaggcatcctgaccgagacc

SEQ ID NO: 1589 - RNA, 21 nt, synthetic construct
  source 1..21: mol_type = other RNA
gttagtgcgacgggtacgcat

SEQ ID NO: 1590 - RNA, 21 nt, synthetic construct
  source 1..21: mol_type = other RNA
ccttttgatagtccttcgaga

SEQ ID NO: 1591 - RNA, 21 nt, synthetic construct
  source 1..21: mol_type = other RNA
ggagaacggaaagtgaacgaa

SEQ ID NO: 1592 - RNA, 21 nt, synthetic construct
  source 1..21: mol_type = other RNA
cccgcccgtggggaaaacgtc

SEQ ID NO: 1593 - RNA, 21 nt, synthetic construct
  source 1..21: mol_type = other RNA
gccctgagcgtgggccagcag

SEQ ID NO: 1594 - RNA, 21 nt, synthetic construct
  source 1..21: mol_type = other RNA
ggccaggccagagaccccatg

SEQ ID NO: 1595 - RNA, 21 nt, synthetic construct
  source 1..21: mol_type = other RNA
tcccgcagcgaacgcacccaa

SEQ ID NO: 1596 - RNA, 21 nt, synthetic construct
  source 1..21: mol_type = other RNA
cccggcaacgaacaaagttta

SEQ ID NO: 1597 - RNA, 21 nt, synthetic construct
  source 1..21: mol_type = other RNA
tctaagagtaatgaggcgctt

SEQ ID NO: 1598 - RNA, 21 nt, synthetic construct
  source 1..21: mol_type = other RNA
ggcctgtacgaccagggcgtg

SEQ ID NO: 1599 - RNA, 21 nt, synthetic construct
  source 1..21: mol_type = other RNA
agcgagagcagaaaggccgac

SEQ ID NO: 1600 - RNA, 21 nt, synthetic construct
  source 1..21: mol_type = other RNA
cagggcccccccgccatggtg

SEQ ID NO: 1601 - RNA, 21 nt, synthetic construct
  source 1..21: mol_type = other RNA
actggtgtgaggaatcaggtg

SEQ ID NO: 1602 - RNA, 21 nt, synthetic construct
  source 1..21: mol_type = other RNA
gacgctaacaaagctctctcg

SEQ ID NO: 1603 - RNA, 21 nt, synthetic construct
  source 1..21: mol_type = other RNA
gtgaccatcggcgacggcttc

SEQ ID NO: 1604 - RNA, 21 nt, synthetic construct
  source 1..21: mol_type = other RNA
aaaaacgaaaaaatgatgctg

SEQ ID NO: 1605 - RNA, 21 nt, synthetic construct
  source 1..21: mol_type = other RNA
aaattcggcggaggcgacttc

SEQ ID NO: 1606 - RNA, 21 nt, synthetic construct
  source 1..21: mol_type = other RNA
agtgagaagactgaggtgctg

SEQ ID NO: 1607 - RNA, 21 nt, synthetic construct
  source 1..21: mol_type = other RNA
ggatctgttgaacacatgaaa

SEQ ID NO: 1608 - RNA, 21 nt, synthetic construct
  source 1..21: mol_type = other RNA
cccctggtggccgtgggcgtg

SEQ ID NO: 1609 - RNA, 21 nt, synthetic construct
  source 1..21: mol_type = other RNA
agagagagtaagcagatggct

SEQ ID NO: 1610 - RNA, 21 nt, synthetic construct
  source 1..21: mol_type = other RNA
agcgacagcaagcagctggcc

SEQ ID NO: 1611 - RNA, 21 nt, synthetic construct
  source 1..21: mol_type = other RNA
aatgttagtctgagtgggatt

SEQ ID NO: 1612 - RNA, 21 nt, synthetic construct
  source 1..21: mol_type = other RNA
ctggtgatccacaccgagatc

SEQ ID NO: 1613 - RNA, 21 nt, synthetic construct
  source 1..21: mol_type = other RNA
ctggttaaggatgcgactcag

SEQ ID NO: 1614 - RNA, 21 nt, synthetic construct
  source 1..21: mol_type = other RNA
gagagagacggcatcaagctg

SEQ ID NO: 1615 - RNA, 21 nt, synthetic construct
  source 1..21: mol_type = other RNA
aaggaccccggcagcgtggtg

SEQ ID NO: 1616 - RNA, 21 nt, synthetic construct
  source 1..21: mol_type = other RNA
cccgagaagaccaagatcgac

SEQ ID NO: 1617 - RNA, 21 nt, synthetic construct
  source 1..21: mol_type = other RNA
ctgcggggtggtgatacgccg

SEQ ID NO: 1618 - RNA, 21 nt, synthetic construct
  source 1..21: mol_type = other RNA
ggcctaatgtcaaaaatcccc

SEQ ID NO: 1619 - RNA, 21 nt, synthetic construct
  source 1..21: mol_type = other RNA
gtggtatccaacggttggcca

SEQ ID NO: 1620 - RNA, 21 nt, synthetic construct
  source 1..21: mol_type = other RNA
gcgaagcgtattagtgagggg

SEQ ID NO: 1621 - RNA, 21 nt, synthetic construct
  source 1..21: mol_type = other RNA
acctacaaccacccatctagc

SEQ ID NO: 1622 - RNA, 21 nt, synthetic construct
  source 1..21: mol_type = other RNA
cccggcaccagcaaggtgaac

SEQ ID NO: 1623 - RNA, 21 nt, synthetic construct
  source 1..21: mol_type = other RNA
gattatatgagtcggggtatt

SEQ ID NO: 1624 - RNA, 21 nt, synthetic construct
  source 1..21: mol_type = other RNA
gtgcgcgcatctgggacccac

SEQ ID NO: 1625 - RNA, 21 nt, synthetic construct
  source 1..21: mol_type = other RNA
agaacctcaaactccgacaac

SEQ ID NO: 1626 - RNA, 21 nt, synthetic construct
  source 1..21: mol_type = other RNA
ggcatgcagggcgtgagaaac

SEQ ID NO: 1627 - RNA, 21 nt, synthetic construct
  source 1..21: mol_type = other RNA
agtgacagccgtcaagctgac

SEQ ID NO: 1628 - DNA, 21 bp, synthetic construct
  source 1..21: mol_type = other DNA
agaaaagagctgctggacggc

SEQ ID NO: 1629 - RNA, 21 nt, synthetic construct
  source 1..21: mol_type = other RNA
ggctctgtcgaacacatgatg

SEQ ID NO: 1630 - RNA, 21 nt, synthetic construct
  source 1..21: mol_type = other RNA
gatgtggagaatgctgggaag

SEQ ID NO: 1631 - RNA, 21 nt, synthetic construct
  source 1..21: mol_type = other RNA
aaggatcctggttctgcggtg

SEQ ID NO: 1632 - RNA, 21 nt, synthetic construct
  source 1..21: mol_type = other RNA
ggcgagtaccagaacatgaga

SEQ ID NO: 1633 - RNA, 21 nt, synthetic construct
  source 1..21: mol_type = other RNA
aacaacagcgacggcaccaga

SEQ ID NO: 1634 - RNA, 21 nt, synthetic construct
  source 1..21: mol_type = other RNA
ggccaagcacgagtgcccctt

SEQ ID NO: 1635 - RNA, 21 nt, synthetic construct
  source 1..21: mol_type = other RNA
gacaaaatatacggtgccctc

SEQ ID NO: 1636 - RNA, 21 nt, synthetic construct
  source 1..21: mol_type = other RNA
ctgggtaaggatgtgactcag

SEQ ID NO: 1637 - RNA, 21 nt, synthetic construct
  source 1..21: mol_type = other RNA
gtgttcgagagctacgccgac

SEQ ID NO: 1638 - RNA, 21 nt, synthetic construct
  source 1..21: mol_type = other RNA
agaagcagcaccacccccacc

SEQ ID NO: 1639 - RNA, 21 nt, synthetic construct
  source 1..21: mol_type = other RNA
aaagacgaaatgaaccgcgtc

SEQ ID NO: 1640 - RNA, 21 nt, synthetic construct
  source 1..21: mol_type = other RNA
tctgctctgtcggggaaggtg

SEQ ID NO: 1641 - RNA, 21 nt, synthetic construct
  source 1..21: mol_type = other RNA
agtgagagtaataagctggct

SEQ ID NO: 1642 - DNA, 21 bp, synthetic construct
  source 1..21: mol_type = other DNA
ggaaggatgaacaacgccacc

SEQ ID NO: 1643 - RNA, 21 nt, synthetic construct
  source 1..21: mol_type = other RNA
ccccgtgtcgacgtgaacctg

SEQ ID NO: 1644 - RNA, 21 nt, synthetic construct
  source 1..21: mol_type = other RNA
tctggtgtgtcggggaaggtg

SEQ ID NO: 1645 - RNA, 21 nt, synthetic construct
  source 1..21: mol_type = other RNA
ggcggcgacaacgccgacaga

SEQ ID NO: 1646 - RNA, 21 nt, synthetic construct
  source 1..21: mol_type = other RNA
cccgtgggcgtgcacatcggc

SEQ ID NO: 1647 - RNA, 21 nt, synthetic construct
  source 1..21: mol_type = other RNA
ctgaccgacaccaagctgacc

SEQ ID NO: 1648 - RNA, 21 nt, synthetic construct
  source 1..21: mol_type = other RNA
gtgaccgtgggcaacggcttc

SEQ ID NO: 1649 - RNA, 21 nt, synthetic construct
  source 1..21: mol_type = other RNA
ctcgtagaccaaaactcgctt

SEQ ID NO: 1650 - RNA, 21 nt, synthetic construct
  source 1..21: mol_type = other RNA
cttaattttagtactcttgtt

SEQ ID NO: 1651 - RNA, 21 nt, synthetic construct
  source 1..21: mol_type = other RNA
cccaaacctgaaaccgtcatg

SEQ ID NO: 1652 - RNA, 21 nt, synthetic construct
  source 1..21: mol_type = other RNA
gcagacggcgtctcaaaaatg

SEQ ID NO: 1653 - RNA, 21 nt, synthetic construct
  source 1..21: mol_type = other RNA
gctctcggggtcggccaaaaa

SEQ ID NO: 1654 - RNA, 21 nt, synthetic construct
  source 1..21: mol_type = other RNA
ggcgacgctggccaaaaagac

SEQ ID NO: 1655 - DNA, 21 bp, synthetic construct
  source 1..21: mol_type = other DNA
gtgatcagcgctaaaaaagaa

SEQ ID NO: 1656 - RNA, 21 nt, synthetic construct
  source 1..21: mol_type = other RNA
aacagaatcgacagcgccacc

SEQ ID NO: 1657 - RNA, 21 nt, synthetic construct
  source 1..21: mol_type = other RNA
caagtaggcagttccaccttc

SEQ ID NO: 1658 - RNA, 21 nt, synthetic construct
  source 1..21: mol_type = other RNA
gaggtgaacatcaagatgagc

SEQ ID NO: 1659 - RNA, 21 nt, synthetic construct
  source 1..21: mol_type = other RNA
gatgtggagaatcgtgggaag

SEQ ID NO: 1660 - RNA, 21 nt, synthetic construct
  source 1..21: mol_type = other RNA
gccaagcagggcgagatccag

SEQ ID NO: 1661 - RNA, 21 nt, synthetic construct
  source 1..21: mol_type = other RNA
ccgccatactcagaaaactcc

SEQ ID NO: 1662 - RNA, 21 nt, synthetic construct
  source 1..21: mol_type = other RNA
gtgttcggcaacaccatcggc

SEQ ID NO: 1663 - RNA, 21 nt, synthetic construct
  source 1..21: mol_type = other RNA
agtttgagtttgcagatgaaa

SEQ ID NO: 1664 - RNA, 21 nt, synthetic construct
  source 1..21: mol_type = other RNA
gggccggcggttaagacgtat

SEQ ID NO: 1665 - RNA, 21 nt, synthetic construct
  source 1..21: mol_type = other RNA
atgatcgggctatctagtgcc

SEQ ID NO: 1666 - RNA, 21 nt, synthetic construct
  source 1..21: mol_type = other RNA
gatgagggggctacgcctaag

SEQ ID NO: 1667 - RNA, 21 nt, synthetic construct
  source 1..21: mol_type = other RNA
gggttgagggcggatgatatg

SEQ ID NO: 1668 - RNA, 21 nt, synthetic construct
  source 1..21: mol_type = other RNA
acgcttaatcaggttattatg

SEQ ID NO: 1669 - RNA, 21 nt, synthetic construct
  source 1..21: mol_type = other RNA
cggagtttgactacgcagact

SEQ ID NO: 1670 - RNA, 21 nt, synthetic construct
  source 1..21: mol_type = other RNA
aacatcctgataaacaccgta

SEQ ID NO: 1671 - RNA, 21 nt, synthetic construct
  source 1..21: mol_type = other RNA
ggggtgaacaaaaccctccac

SEQ ID NO: 1672 - RNA, 21 nt, synthetic construct
  source 1..21: mol_type = other RNA
aacggccagggcgtgtacgtg

SEQ ID NO: 1673 - RNA, 21 nt, synthetic construct
  source 1..21: mol_type = other RNA
gacaaaaacgccgccaccgcc

SEQ ID NO: 1674 - RNA, 21 nt, synthetic construct
  source 1..21: mol_type = other RNA
gataagaatgcggcgatgggg

SEQ ID NO: 1675 - RNA, 21 nt, synthetic construct
  source 1..21: mol_type = other RNA
aaccgcaacacatcccacaac

SEQ ID NO: 1676 - RNA, 21 nt, synthetic construct
  source 1..21: mol_type = other RNA
cccaccagaagcgagaacgtg

SEQ ID NO: 1677 - RNA, 21 nt, synthetic construct
  source 1..21: mol_type = other RNA
gtaatctctgctaaactgcaa

SEQ ID NO: 1678 - RNA, 21 nt, synthetic construct
  source 1..21: mol_type = other RNA
agaaacgcccccaacatggac

SEQ ID NO: 1679 - RNA, 21 nt, synthetic construct
  source 1..21: mol_type = other RNA
gccccgagtggaatcaaactc

SEQ ID NO: 1680 - RNA, 21 nt, synthetic construct
  source 1..21: mol_type = other RNA
gaccatgatgcttctagtaat

SEQ ID NO: 1681 - RNA, 21 nt, synthetic construct
  source 1..21: mol_type = other RNA
cgcttaacgcgcgacgacacc

SEQ ID NO: 1682 - RNA, 21 nt, synthetic construct
  source 1..21: mol_type = other RNA
gtgtttgcgagtcatgctgct

SEQ ID NO: 1683 - RNA, 21 nt, synthetic construct
  source 1..21: mol_type = other RNA
ctgcaccacgctacaaaagaa

SEQ ID NO: 1684 - RNA, 21 nt, synthetic construct
  source 1..21: mol_type = other RNA
gggccggcgggtaagacgaat

SEQ ID NO: 1685 - RNA, 21 nt, synthetic construct
  source 1..21: mol_type = other RNA
ccaggcagcagcgccaacctc

SEQ ID NO: 1686 - RNA, 21 nt, synthetic construct
  source 1..21: mol_type = other RNA
agcggagctatgggcggtagc

SEQ ID NO: 1687 - RNA, 21 nt, synthetic construct
  source 1..21: mol_type = other RNA
accggcctctcaggaaaagtt

SEQ ID NO: 1688 - RNA, 21 nt, synthetic construct
  source 1..21: mol_type = other RNA
ttgcgggtgggttcgggtatt

SEQ ID NO: 1689 - RNA, 21 nt, synthetic construct
  source 1..21: mol_type = other RNA
ggtatgcagggtggtcgtatt

SEQ ID NO: 1690 - RNA, 21 nt, synthetic construct
  source 1..21: mol_type = other RNA
ggcgtgaacagcgacctgcag

SEQ ID NO: 1691 - RNA, 21 nt, synthetic construct
  source 1..21: mol_type = other RNA
cgcaaccaaaacgacacacaa

SEQ ID NO: 1692 - RNA, 21 nt, synthetic construct
  source 1..21: mol_type = other RNA
cacctggtggccgtgggcgtg

SEQ ID NO: 1693 - RNA, 21 nt, synthetic construct
  source 1..21: mol_type = other RNA
aagcagatcaaggacgccacc

SEQ ID NO: 1694 - RNA, 21 nt, synthetic construct
  source 1..21: mol_type = other RNA
cgtgagaatgctgtgcctccg

SEQ ID NO: 1695 - RNA, 21 nt, synthetic construct
  source 1..21: mol_type = other RNA
ggccacgccaacagcaacatg

SEQ ID NO: 1696 - RNA, 21 nt, synthetic construct
  source 1..21: mol_type = other RNA
cccggcagctacggcggcggc

SEQ ID NO: 1697 - RNA, 21 nt, synthetic construct
  source 1..21: mol_type = other RNA
atgcacgacctgagtaccgca

SEQ ID NO: 1698 - RNA, 21 nt, synthetic construct
  source 1..21: mol_type = other RNA
ggtaatggtacgcataatccg

SEQ ID NO: 1699 - RNA, 21 nt, synthetic construct
  source 1..21: mol_type = other RNA
gctgtgggcctctcaaaaatg

SEQ ID NO: 1700 - RNA, 21 nt, synthetic construct
  source 1..21: mol_type = other RNA
ggtttgtcgcagaagatgacg

SEQ ID NO: 1701 - RNA, 21 nt, synthetic construct
  source 1..21: mol_type = other RNA
gaaacaggaaaagccgtgaaa

SEQ ID NO: 1702 - RNA, 21 nt, synthetic construct
  source 1..21: mol_type = other RNA
aacgtgaagagcagcgagacc

SEQ ID NO: 1703 - RNA, 21 nt, synthetic construct
  source 1..21: mol_type = other RNA
acctcccccaacaacacagaa

SEQ ID NO: 1704 - RNA, 21 nt, synthetic construct
  source 1..21: mol_type = other RNA
gagcccggcgtgaagagagag

SEQ ID NO: 1705 - RNA, 21 nt, synthetic construct
  source 1..21: mol_type = other RNA
gggacgttgcctaaaatggct

SEQ ID NO: 1706 - RNA, 21 nt, synthetic construct
  source 1..21: mol_type = other RNA
tacgaatcaagacaagctgac

SEQ ID NO: 1707 - RNA, 21 nt, synthetic construct
  source 1..21: mol_type = other RNA
gagagagagggcaacaagctg

SEQ ID NO: 1708 - RNA, 21 nt, synthetic construct
  source 1..21: mol_type = other RNA
gtgcaggccagagtgcccatg

SEQ ID NO: 1709 - RNA, 21 nt, synthetic construct
  source 1..21: mol_type = other RNA
agcactaggggagaaaacgtt

SEQ ID NO: 1710 - RNA, 21 nt, synthetic construct
  source 1..21: mol_type = other RNA
gaccaacttaaaatgagagtt

SEQ ID NO: 1711 - RNA, 21 nt, synthetic construct
  source 1..21: mol_type = other RNA
ggcgtgcaccagaacatgaga

SEQ ID NO: 1712 - DNA, 21 bp, synthetic construct
  source 1..21: mol_type = other DNA
aaaaaaccaccaagtgatcat

SEQ ID NO: 1713 - RNA, 21 nt, synthetic construct
  source 1..21: mol_type = other RNA
gcagttacggcccgggtccaa

SEQ ID NO: 1714 - RNA, 21 nt, synthetic construct
  source 1..21: mol_type = other RNA
gtcggttcggaatccgctaca

SEQ ID NO: 1715 - RNA, 21 nt, synthetic construct
  source 1..21: mol_type = other RNA
gttgttccggggctttatacg

SEQ ID NO: 1716 - RNA, 21 nt, synthetic construct
  source 1..21: mol_type = other RNA
aatcatagtggtgggcctcag

SEQ ID NO: 1717 - RNA, 21 nt, synthetic construct
  source 1..21: mol_type = other RNA
ccgccgcgttctgggtttatg

SEQ ID NO: 1718 - RNA, 21 nt, synthetic construct
  source 1..21: mol_type = other RNA
cccgtgggcgaccacatcgag

SEQ ID NO: 1719 - RNA, 21 nt, synthetic construct
  source 1..21: mol_type = other RNA
cctaagccggaggctgtgttg

SEQ ID NO: 1720 - RNA, 21 nt, synthetic construct
  source 1..21: mol_type = other RNA
gcgaaagcaccccaaacaggt

SEQ ID NO: 1721 - RNA, 21 nt, synthetic construct
  source 1..21: mol_type = other RNA
cccaacaacctgcccagaagc

SEQ ID NO: 1722 - RNA, 21 nt, synthetic construct
  source 1..21: mol_type = other RNA
caagtgggaagcagctacgtg

SEQ ID NO: 1723 - RNA, 21 nt, synthetic construct
  source 1..21: mol_type = other RNA
cgtcacgacaactccaacatg

SEQ ID NO: 1724 - RNA, 21 nt, synthetic construct
  source 1..21: mol_type = other RNA
agactgtacgaccagggcatg

SEQ ID NO: 1725 - RNA, 21 nt, synthetic construct
  source 1..21: mol_type = other RNA
cccatccaccaagtgatcaaa

SEQ ID NO: 1726 - RNA, 21 nt, synthetic construct
  source 1..21: mol_type = other RNA
gcccccagcggcatcaagctg

SEQ ID NO: 1727 - RNA, 21 nt, synthetic construct
  source 1..21: mol_type = other RNA
gagaacgccagctacgccgcc

SEQ ID NO: 1728 - RNA, 21 nt, synthetic construct
  source 1..21: mol_type = other RNA
accatcacccccagcagcagc

SEQ ID NO: 1729 - RNA, 21 nt, synthetic construct
  source 1..21: mol_type = other RNA
gggggaagtggtcaaaaagac

SEQ ID NO: 1730 - RNA, 21 nt, synthetic construct
  source 1..21: mol_type = other RNA
agagacagagtgatcctgatc

SEQ ID NO: 1731 - RNA, 21 nt, synthetic construct
  source 1..21: mol_type = other RNA
atgggcctgatcaacaggcaa

SEQ ID NO: 1732 - RNA, 21 nt, synthetic construct
  source 1..21: mol_type = other RNA
ctcgtcgaccgcaactcggtt

SEQ ID NO: 1733 - RNA, 21 nt, synthetic construct
  source 1..21: mol_type = other RNA
ggactccgcctcaacgtgagc

SEQ ID NO: 1734 - RNA, 21 nt, synthetic construct
  source 1..21: mol_type = other RNA
gagagcggcgtgaagcaggag

SEQ ID NO: 1735 - RNA, 21 nt, synthetic construct
  source 1..21: mol_type = other RNA
cgccaatccgtgaacagcggc

SEQ ID NO: 1736 - RNA, 21 nt, synthetic construct
  source 1..21: mol_type = other RNA
gtcgaacgagccgttacatca

SEQ ID NO: 1737 - RNA, 21 nt, synthetic construct
  source 1..21: mol_type = other RNA
gtgtttgcgagttatgatgat

SEQ ID NO: 1738 - RNA, 21 nt, synthetic construct
  source 1..21: mol_type = other RNA
aaagaccccgtgagtgccgtt

SEQ ID NO: 1739 - RNA, 21 nt, synthetic construct
  source 1..21: mol_type = other RNA
gggtccgcctcggcccacaac

SEQ ID NO: 1740 - RNA, 21 nt, synthetic construct
  source 1..21: mol_type = other RNA
agtaggtcggagagtacgcag

SEQ ID NO: 1741 - RNA, 21 nt, synthetic construct
  source 1..21: mol_type = other RNA
ctgatcagcgccaagctggag

SEQ ID NO: 1742 - RNA, 21 nt, synthetic construct
  source 1..21: mol_type = other RNA
caaatatctggcatcgaaatg

SEQ ID NO: 1743 - RNA, 21 nt, synthetic construct
  source 1..21: mol_type = other RNA
agtagtgagaagatttcgagg

SEQ ID NO: 1744 - RNA, 21 nt, synthetic construct
  source 1..21: mol_type = other RNA
ggcaacggcaccagcaacccc

SEQ ID NO: 1745 - RNA, 21 nt, synthetic construct
  source 1..21: mol_type = other RNA
gtgaaggtgtacggcgccctg

SEQ ID NO: 1746 - RNA, 21 nt, synthetic construct
  source 1..21: mol_type = other RNA
gacgtggagaacagaggcaag

SEQ ID NO: 1747 - RNA, 21 nt, synthetic construct
  source 1..21: mol_type = other RNA
accaccgaaaggacagccacc

SEQ ID NO: 1748 - RNA, 21 nt, synthetic construct
  source 1..21: mol_type = other RNA
agtgagaagactgatgggctg

SEQ ID NO: 1749 - RNA, 21 nt, synthetic construct
  source 1..21: mol_type = other RNA
accatcgagagaaccagcacc

SEQ ID NO: 1750 - RNA, 21 nt, synthetic construct
  source 1..21: mol_type = other RNA
ccgaatcttctgcactcgcag

SEQ ID NO: 1751 - RNA, 21 nt, synthetic construct
  source 1..21: mol_type = other RNA
gtgatgaagattgagacgggg

SEQ ID NO: 1752 - RNA, 21 nt, synthetic construct
  source 1..21: mol_type = other RNA
acccagggcgccgagagcctg

SEQ ID NO: 1753 - RNA, 21 nt, synthetic construct
  source 1..21: mol_type = other RNA
atgctgctgagaaccgacgag

SEQ ID NO: 1754 - RNA, 21 nt, synthetic construct
  source 1..21: mol_type = other RNA
gggatgtattcggtttcggtg

SEQ ID NO: 1755 - RNA, 21 nt, synthetic construct
  source 1..21: mol_type = other RNA
gtgatcagccagaagcccatc

SEQ ID NO: 1756 - RNA, 21 nt, synthetic construct
  source 1..21: mol_type = other RNA
gtgttcggcgcccacaacgtg

SEQ ID NO: 1757 - RNA, 21 nt, synthetic construct
  source 1..21: mol_type = other RNA
accgaccccaagatccagaag

SEQ ID NO: 1758 - RNA, 21 nt, synthetic construct
  source 1..21: mol_type = other RNA
atgaatattactaaggtgccg

SEQ ID NO: 1759 - RNA, 21 nt, synthetic construct
  source 1..21: mol_type = other RNA
aagaatgatacttttaaggtt

SEQ ID NO: 1760 - RNA, 21 nt, synthetic construct
  source 1..21: mol_type = other RNA
ctggtggaccagatcagcgtg

SEQ ID NO: 1761 - RNA, 21 nt, synthetic construct
  source 1..21: mol_type = other RNA
agaaacggcatggccctggcc

SEQ ID NO: 1762 - RNA, 21 nt, synthetic construct
  source 1..21: mol_type = other RNA
aacaagaacgagcagcagaga

SEQ ID NO: 1763 - RNA, 21 nt, synthetic construct
  source 1..21: mol_type = other RNA
gcttggtctgtaggccaaaaa

SEQ ID NO: 1764 - RNA, 21 nt, synthetic construct
  source 1..21: mol_type = other RNA
ccgccgcgtgctgagtttatg

SEQ ID NO: 1765 - RNA, 21 nt, synthetic construct
  source 1..21: mol_type = other RNA
aaccacaacggcagaccccag

SEQ ID NO: 1766 - RNA, 21 nt, synthetic construct
  source 1..21: mol_type = other RNA
cctatggtggtggttgagagg

SEQ ID NO: 1767 - RNA, 21 nt, synthetic construct
  source 1..21: mol_type = other RNA
tctggggaaagtgtgcgtgcg

SEQ ID NO: 1768 - RNA, 21 nt, synthetic construct
  source 1..21: mol_type = other RNA
ctaatcaacagggtgacaaca

SEQ ID NO: 1769 - RNA, 21 nt, synthetic construct
  source 1..21: mol_type = other RNA
agagagagagtggacaccatc

SEQ ID NO: 1770 - RNA, 21 nt, synthetic construct
  source 1..21: mol_type = other RNA
cacctgggctacgaaagctca

SEQ ID NO: 1771 - RNA, 21 nt, synthetic construct
  source 1..21: mol_type = other RNA
aggaaggagactcagggtgat

SEQ ID NO: 1772 - RNA, 21 nt, synthetic construct
  source 1..21: mol_type = other RNA
cgccacgccaacagtgacatg

SEQ ID NO: 1773 - RNA, 21 nt, synthetic construct
  source 1..21: mol_type = other RNA
gccaacaacgagagcgccgtg

SEQ ID NO: 1774 - RNA, 21 nt, synthetic construct
  source 1..21: mol_type = other RNA
actatgtcgagtgctgatggg

SEQ ID NO: 1775 - RNA, 21 nt, synthetic construct
  source 1..21: mol_type = other RNA
ctcttcggagcccacagcgtg

SEQ ID NO: 1776 - RNA, 21 nt, synthetic construct
  source 1..21: mol_type = other RNA
ccctacaacctcacaacgtcc

SEQ ID NO: 1777 - RNA, 21 nt, synthetic construct
  source 1..21: mol_type = other RNA
atgattaatcgtgttactgct

SEQ ID NO: 1778 - RNA, 21 nt, synthetic construct
  source 1..21: mol_type = other RNA
ggtgagcgtaaggttcatgcg

SEQ ID NO: 1779 - RNA, 21 nt, synthetic construct
  source 1..21: mol_type = other RNA
gtaaaccacggcggcggccaa

SEQ ID NO: 1780 - RNA, 21 nt, synthetic construct
  source 1..21: mol_type = other RNA
gtgggtgctacgaagagtatt

SEQ ID NO: 1781 - RNA, 21 nt, synthetic construct
  source 1..21: mol_type = other RNA
gttatcgcgacaaaaagcatc

SEQ ID NO: 1782 - RNA, 21 nt, synthetic construct
  source 1..21: mol_type = other RNA
cccacctggggcgagaacgtg

SEQ ID NO: 1783 - RNA, 21 nt, synthetic construct
  source 1..21: mol_type = other RNA
ggcgagatgagaagcgtggtg

SEQ ID NO: 1784 - RNA, 21 nt, synthetic construct
  source 1..21: mol_type = other RNA
aaaagcgactcccaccaatac

SEQ ID NO: 1785 - RNA, 21 nt, synthetic construct
  source 1..21: mol_type = other RNA
caggtgatgggcaccctgaac

SEQ ID NO: 1786 - RNA, 21 nt, synthetic construct
  source 1..21: mol_type = other RNA
gagatctacaacaccgcccag

SEQ ID NO: 1787 - RNA, 21 nt, synthetic construct
  source 1..21: mol_type = other RNA
aaaatccaccaagacatcatg

SEQ ID NO: 1788 - RNA, 21 nt, synthetic construct
  source 1..21: mol_type = other RNA
agcagcaagcccggcagctac

SEQ ID NO: 1789 - RNA, 21 nt, synthetic construct
  source 1..21: mol_type = other RNA
gccagaaacgtgatcgagagc

SEQ ID NO: 1790 - RNA, 21 nt, synthetic construct
  source 1..21: mol_type = other RNA
ggctacgaccacaaatccagc

SEQ ID NO: 1791 - RNA, 21 nt, synthetic construct
  source 1..21: mol_type = other RNA
gttatttcggcgaagcttgtg

SEQ ID NO: 1792 - RNA, 21 nt, synthetic construct
  source 1..21: mol_type = other RNA
aaaatagacaccatcaaactg

SEQ ID NO: 1793 - RNA, 21 nt, synthetic construct
  source 1..21: mol_type = other RNA
aaccgttccaccagtgacaac

SEQ ID NO: 1794 - RNA, 21 nt, synthetic construct
  source 1..21: mol_type = other RNA
aaccacaacggcggcagacag

SEQ ID NO: 1795 - RNA, 21 nt, synthetic construct
  source 1..21: mol_type = other RNA
cttgtgaaagacgccacccaa

SEQ ID NO: 1796 - RNA, 21 nt, synthetic construct
  source 1..21: mol_type = other RNA
cccagagtggacttcaacaga

SEQ ID NO: 1797 - RNA, 21 nt, synthetic construct
  source 1..21: mol_type = other RNA
gggccggcggctaagacgaat

SEQ ID NO: 1798 - RNA, 21 nt, synthetic construct
  source 1..21: mol_type = other RNA
ggcctcaaactcaacgtctct

SEQ ID NO: 1799 - RNA, 21 nt, synthetic construct
  source 1..21: mol_type = other RNA
tcccccaccggaatcaaatta

SEQ ID NO: 1800 - RNA, 21 nt, synthetic construct
  source 1..21: mol_type = other RNA
aacgggcaaggagtcagtgga

SEQ ID NO: 1801 - RNA, 21 nt, synthetic construct
  source 1..21: mol_type = other RNA
cccactagaggcgaagacgtt

SEQ ID NO: 1802 - RNA, 21 nt, synthetic construct
  source 1..21: mol_type = other RNA
ggaaacgtgctcaaaagcagc

SEQ ID NO: 1803 - RNA, 21 nt, synthetic construct
  source 1..21: mol_type = other RNA
cggtcggtgtcacaccaatac

SEQ ID NO: 1804 - RNA, 21 nt, synthetic construct
  source 1..21: mol_type = other RNA
gagatgactgggttgcgggag

SEQ ID NO: 1805 - RNA, 21 nt, synthetic construct
  source 1..21: mol_type = other RNA
gctgacggcttcagcaaaatg

SEQ ID NO: 1806 - RNA, 21 nt, synthetic construct
  source 1..21: mol_type = other RNA
gacgtgaagagcgacaccgag

SEQ ID NO: 1807 - RNA, 21 nt, synthetic construct
  source 1..21: mol_type = other RNA
ctcatccctagcgttgacgtt

SEQ ID NO: 1808 - DNA, 21 bp, synthetic construct
  source 1..21: mol_type = other DNA
ggatacgtgatcaagagcagc

SEQ ID NO: 1809 - RNA, 21 nt, synthetic construct
  source 1..21: mol_type = other RNA
ccctacaacctgcacagctac

SEQ ID NO: 1810 - RNA, 21 nt, synthetic construct
  source 1..21: mol_type = other RNA
gggaggcataatgagacttcg

SEQ ID NO: 1811 - RNA, 21 nt, synthetic construct
  source 1..21: mol_type = other RNA
aatatgaatacttctgataat

SEQ ID NO: 1812 - RNA, 21 nt, synthetic construct
  source 1..21: mol_type = other RNA
cccggcaaaggccaatctctg

SEQ ID NO: 1813 - RNA, 21 nt, synthetic construct
  source 1..21: mol_type = other RNA
gtgattatgcagacgcagaat

SEQ ID NO: 1814 - RNA, 21 nt, synthetic construct
  source 1..21: mol_type = other RNA
aaccaaaccggttctcgagga

SEQ ID NO: 1815 - RNA, 21 nt, synthetic construct
  source 1..21: mol_type = other RNA
cacgtgcagagaatgaccatg

SEQ ID NO: 1816 - RNA, 21 nt, synthetic construct
  source 1..21: mol_type = other RNA
ggtcttcgaggcgaagacatg

SEQ ID NO: 1817 - RNA, 21 nt, synthetic construct
  source 1..21: mol_type = other RNA
gcaacccggcaatccatgact

SEQ ID NO: 1818 - RNA, 21 nt, synthetic construct
  source 1..21: mol_type = other RNA
gacaaagaaatgagagcactt

SEQ ID NO: 1819 - RNA, 21 nt, synthetic construct
  source 1..21: mol_type = other RNA
ccgaatattctgcagtcgcag

SEQ ID NO: 1820 - RNA, 21 nt, synthetic construct
  source 1..21: mol_type = other RNA
atgttcgggggacgcgacttc

SEQ ID NO: 1821 - RNA, 21 nt, synthetic construct
  source 1..21: mol_type = other RNA
tcgttgttgcctgggaatctt

SEQ ID NO: 1822 - RNA, 21 nt, synthetic construct
  source 1..21: mol_type = other RNA
aggaatgctccgaatatgggt

SEQ ID NO: 1823 - RNA, 21 nt, synthetic construct
  source 1..21: mol_type = other RNA
attaaagaaacaatgaaactg

SEQ ID NO: 1824 - RNA, 21 nt, synthetic construct
  source 1..21: mol_type = other RNA
ggtgagtatcagaatatgcgg

SEQ ID NO: 1825 - RNA, 21 nt, synthetic construct
  source 1..21: mol_type = other RNA
aaggacagcggcagcgccgtg

SEQ ID NO: 1826 - RNA, 21 nt, synthetic construct
  source 1..21: mol_type = other RNA
atagacagattcgacagatct

SEQ ID NO: 1827 - RNA, 21 nt, synthetic construct
  source 1..21: mol_type = other RNA
cacgacaaatcttcagaaaac

SEQ ID NO: 1828 - RNA, 21 nt, synthetic construct
  source 1..21: mol_type = other RNA
aatggtcagggtggttctgtt

SEQ ID NO: 1829 - RNA, 21 nt, synthetic construct
  source 1..21: mol_type = other RNA
atgggcagtataaaccaacaa

SEQ ID NO: 1830 - RNA, 21 nt, synthetic construct
  source 1..21: mol_type = other RNA
agcaagagcaacgagaccccc

SEQ ID NO: 1831 - RNA, 21 nt, synthetic construct
  source 1..21: mol_type = other RNA
gaaaaagttgaaaaagtttca

SEQ ID NO: 1832 - RNA, 21 nt, synthetic construct
  source 1..21: mol_type = other RNA
ggcatcatgcagacccacaac

SEQ ID NO: 1833 - DNA, 21 bp, synthetic construct
  source 1..21: mol_type = other DNA
ggttatgggttgtctgggagt

SEQ ID NO: 1834 - RNA, 21 nt, synthetic construct
  source 1..21: mol_type = other RNA
ggcctgatgaccaagatcagc

SEQ ID NO: 1835 - RNA, 21 nt, synthetic construct
  source 1..21: mol_type = other RNA
gggaaggcgattgttgagaat

SEQ ID NO: 1836 - RNA, 21 nt, synthetic construct
  source 1..21: mol_type = other RNA
aaaaaccaccaagtgatcatg

SEQ ID NO: 1837 - RNA, 21 nt, synthetic construct
  source 1..21: mol_type = other RNA
agcgtgagcctgaccaagacc

SEQ ID NO: 1838 - RNA, 21 nt, synthetic construct
  source 1..21: mol_type = other RNA
aaccacaacgggggactaagt

SEQ ID NO: 1839 - RNA, 21 nt, synthetic construct
  source 1..21: mol_type = other RNA
ggctacgaagggaaccaacac

SEQ ID NO: 1840 - RNA, 21 nt, synthetic construct
  source 1..21: mol_type = other RNA
gtgaccatcggcaacggctac

SEQ ID NO: 1841 - RNA, 21 nt, synthetic construct
  source 1..21: mol_type = other RNA
aacggaaaaggcatcgaactg

SEQ ID NO: 1842 - RNA, 21 nt, synthetic construct
  source 1..21: mol_type = other RNA
agcatgaacggcatcctgatc

SEQ ID NO: 1843 - RNA, 21 nt, synthetic construct
  source 1..21: mol_type = other RNA
ggaatctcctccaacacacaa

SEQ ID NO: 1844 - RNA, 21 nt, synthetic construct
  source 1..21: mol_type = other RNA
cttagcttaaaaacctcacta

SEQ ID NO: 1845 - RNA, 21 nt, synthetic construct
  source 1..21: mol_type = other RNA
caacaaggcgtcccatcttca

SEQ ID NO: 1846 - RNA, 21 nt, synthetic construct
  source 1..21: mol_type = other RNA
aatattcagcggaatcagctg

SEQ ID NO: 1847 - RNA, 21 nt, synthetic construct
  source 1..21: mol_type = other RNA
tcgatgaatgggattactagt

SEQ ID NO: 1848 - RNA, 21 nt, synthetic construct
  source 1..21: mol_type = other RNA
cgaaaccaaaacaactcccaa

SEQ ID NO: 1849 - RNA, 21 nt, synthetic construct
  source 1..21: mol_type = other RNA
acgtcgccgaataatagtcag

SEQ ID NO: 1850 - RNA, 21 nt, synthetic construct
  source 1..21: mol_type = other RNA
ggggttaattctgctctgcgg

SEQ ID NO: 1851 - RNA, 21 nt, synthetic construct
  source 1..21: mol_type = other RNA
gtcttccgtgcccactccgtc

SEQ ID NO: 1852 - RNA, 21 nt, synthetic construct
  source 1..21: mol_type = other RNA
ctcagagttggatccggcatc

SEQ ID NO: 1853 - RNA, 21 nt, synthetic construct
  source 1..21: mol_type = other RNA
accaaccacaagctgatcatg

SEQ ID NO: 1854 - RNA, 21 nt, synthetic construct
  source 1..21: mol_type = other RNA
tctgagagtcggcaggcgcat

SEQ ID NO: 1855 - RNA, 21 nt, synthetic construct
  source 1..21: mol_type = other RNA
agcaagagcaacggcaccctg

SEQ ID NO: 1856 - RNA, 21 nt, synthetic construct
  source 1..21: mol_type = other RNA
gataagaatgcggcgacggcg

SEQ ID NO: 1857 - RNA, 21 nt, synthetic construct
  source 1..21: mol_type = other RNA
ggcctgccccagaagatgatg

SEQ ID NO: 1858 - RNA, 21 nt, synthetic construct
  source 1..21: mol_type = other RNA
gggactattgggaatgggttt

SEQ ID NO: 1859 - RNA, 21 nt, synthetic construct
  source 1..21: mol_type = other RNA
gtggacagaaccagagacgag

SEQ ID NO: 1860 - RNA, 21 nt, synthetic construct
  source 1..21: mol_type = other RNA
accgggaaaggctccgaactg

SEQ ID NO: 1861 - RNA, 21 nt, synthetic construct
  source 1..21: mol_type = other RNA
ggcctgacccccttcggcaga

SEQ ID NO: 1862 - RNA, 21 nt, synthetic construct
  source 1..21: mol_type = other RNA
ctcgtaaaaaacggcataata

SEQ ID NO: 1863 - RNA, 21 nt, synthetic construct
  source 1..21: mol_type = other RNA
ggccaggcccccgtgcccatg

SEQ ID NO: 1864 - RNA, 21 nt, synthetic construct
  source 1..21: mol_type = other RNA
aaagacagatacgacaacgac

SEQ ID NO: 1865 - RNA, 21 nt, synthetic construct
  source 1..21: mol_type = other RNA
tctaaggcgccggagactggg

SEQ ID NO: 1866 - RNA, 21 nt, synthetic construct
  source 1..21: mol_type = other RNA
attgataggtctgagaggtcg

SEQ ID NO: 1867 - RNA, 21 nt, synthetic construct
  source 1..21: mol_type = other RNA
gtgagaatcagcgaccacatc

SEQ ID NO: 1868 - RNA, 21 nt, synthetic construct
  source 1..21: mol_type = other RNA
ccccccagaggcgagaacgtg

SEQ ID NO: 1869 - RNA, 21 nt, synthetic construct
  source 1..21: mol_type = other RNA
aaaatcgacacattcaaaggc

SEQ ID NO: 1870 - RNA, 21 nt, synthetic construct
  source 1..21: mol_type = other RNA
ggcgtgaacaacaccctgctg

SEQ ID NO: 1871 - RNA, 21 nt, synthetic construct
  source 1..21: mol_type = other RNA
agccttgtccaaaacgttgtg

SEQ ID NO: 1872 - RNA, 21 nt, synthetic construct
  source 1..21: mol_type = other RNA
atggtgaagatcgagaccggc

SEQ ID NO: 1873 - RNA, 21 nt, synthetic construct
  source 1..21: mol_type = other RNA
gaaaatatggctaagcatgag

SEQ ID NO: 1874 - RNA, 21 nt, synthetic construct
  source 1..21: mol_type = other RNA
agtatggtgaagaatgtggat

SEQ ID NO: 1875 - RNA, 21 nt, synthetic construct
  source 1..21: mol_type = other RNA
gttaacaacggaggagaaaaa

SEQ ID NO: 1876 - RNA, 21 nt, synthetic construct
  source 1..21: mol_type = other RNA
tctcagattattaagcgggag

SEQ ID NO: 1877 - RNA, 21 nt, synthetic construct
  source 1..21: mol_type = other RNA
agttatctgactcaggttatt

SEQ ID NO: 1878 - RNA, 21 nt, synthetic construct
  source 1..21: mol_type = other RNA
gtgaaccacggcggcgagcag

SEQ ID NO: 1879 - RNA, 21 nt, synthetic construct
  source 1..21: mol_type = other RNA
ctgttggttgggacaggaatc

SEQ ID NO: 1880 - RNA, 21 nt, synthetic construct
  source 1..21: mol_type = other RNA
gtgttccaaagagaacacgtt

SEQ ID NO: 1881 - RNA, 21 nt, synthetic construct
  source 1..21: mol_type = other RNA
agcctgagcctgcagatgaag

SEQ ID NO: 1882 - RNA, 21 nt, synthetic construct
  source 1..21: mol_type = other RNA
gaagtcaacatcaaaatgacg

SEQ ID NO: 1883 - RNA, 21 nt, synthetic construct
  source 1..21: mol_type = other RNA
agaagcctgaccacccagacc

SEQ ID NO: 1884 - RNA, 21 nt, synthetic construct
  source 1..21: mol_type = other RNA
atgcgtaatcagactgcgatt

SEQ ID NO: 1885 - RNA, 21 nt, synthetic construct
  source 1..21: mol_type = other RNA
agggtagcccaagaagtccaa

SEQ ID NO: 1886 - RNA, 21 nt, synthetic construct
  source 1..21: mol_type = other RNA
ctggtgctgcagagcagcacc

SEQ ID NO: 1887 - RNA, 21 nt, synthetic construct
  source 1..21: mol_type = other RNA
gcttttggtgttcttaatatg

SEQ ID NO: 1888 - RNA, 21 nt, synthetic construct
  source 1..21: mol_type = other RNA
aatcttgtggcggttggtgtg

SEQ ID NO: 1889 - RNA, 21 nt, synthetic construct
  source 1..21: mol_type = other RNA
accacccccaagaacagcgag

SEQ ID NO: 1890 - RNA, 21 nt, synthetic construct
  source 1..21: mol_type = other RNA
atttcggtgggtacgaagtcg

SEQ ID NO: 1891 - RNA, 21 nt, synthetic construct
  source 1..21: mol_type = other RNA
ggtctgttgggtaatatttcg

SEQ ID NO: 1892 - RNA, 21 nt, synthetic construct
  source 1..21: mol_type = other RNA
aagatcaaccaggtgatcatc

SEQ ID NO: 1893 - RNA, 21 nt, synthetic construct
  source 1..21: mol_type = other RNA
gtgaagcacggcggcgagcag

SEQ ID NO: 1894 - RNA, 21 nt, synthetic construct
  source 1..21: mol_type = other RNA
ccttctgatagtccttcgagt

SEQ ID NO: 1895 - RNA, 21 nt, synthetic construct
  source 1..21: mol_type = other RNA
gtcaccgcgaccaaatccatc

SEQ ID NO: 1896 - RNA, 21 nt, synthetic construct
  source 1..21: mol_type = other RNA
atcgacggtatcgacccttct

SEQ ID NO: 1897 - RNA, 21 nt, synthetic construct
  source 1..21: mol_type = other RNA
cgtctgaatcatatggatact

SEQ ID NO: 1898 - RNA, 21 nt, synthetic construct
  source 1..21: mol_type = other RNA
cgcagccccaacaacagcgaa

SEQ ID NO: 1899 - RNA, 21 nt, synthetic construct
  source 1..21: mol_type = other RNA
ggtaatgagcaggcggagcgt

SEQ ID NO: 1900 - RNA, 21 nt, synthetic construct
  source 1..21: mol_type = other RNA
cgtgtggctctggatgtgcag

SEQ ID NO: 1901 - RNA, 21 nt, synthetic construct
  source 1..21: mol_type = other RNA
gctagggttgatgttaatcgt

SEQ ID NO: 1902 - RNA, 21 nt, synthetic construct
  source 1..21: mol_type = other RNA
actgagcctggtgtgtcgggg

SEQ ID NO: 1903 - RNA, 21 nt, synthetic construct
  source 1..21: mol_type = other RNA
ggcagcaagctggccaccccc

SEQ ID NO: 1904 - RNA, 21 nt, synthetic construct
  source 1..21: mol_type = other RNA
aacagagtgaccgcctaccag

SEQ ID NO: 1905 - RNA, 21 nt, synthetic construct
  source 1..21: mol_type = other RNA
ctgagcaacagccccagaagc

SEQ ID NO: 1906 - RNA, 21 nt, synthetic construct
  source 1..21: mol_type = other RNA
ttggataagtctcagaggggt

SEQ ID NO: 1907 - RNA, 21 nt, synthetic construct
  source 1..21: mol_type = other RNA
acgattagtcatgtgagtaat

SEQ ID NO: 1908 - RNA, 21 nt, synthetic construct
  source 1..21: mol_type = other RNA
ggcctgagaagcgaggacatg

SEQ ID NO: 1909 - RNA, 21 nt, synthetic construct
  source 1..21: mol_type = other RNA
tacctgaaaaacaacaatgtc

SEQ ID NO: 1910 - RNA, 21 nt, synthetic construct
  source 1..21: mol_type = other RNA
ggcggcttccacgtggaggtg

SEQ ID NO: 1911 - RNA, 21 nt, synthetic construct
  source 1..21: mol_type = other RNA
atgaaggacacgaagatgttg

SEQ ID NO: 1912 - RNA, 21 nt, synthetic construct
  source 1..21: mol_type = other RNA
aacatcgagagaaccgccacc

SEQ ID NO: 1913 - RNA, 21 nt, synthetic construct
  source 1..21: mol_type = other RNA
gccaaggcccccgagaccgcc

SEQ ID NO: 1914 - RNA, 21 nt, synthetic construct
  source 1..21: mol_type = other RNA
agaggcaaggaggtgggcaac

SEQ ID NO: 1915 - RNA, 21 nt, synthetic construct
  source 1..21: mol_type = other RNA
gacgtaggtaaccccggcaaa

SEQ ID NO: 1916 - RNA, 21 nt, synthetic construct
  source 1..21: mol_type = other RNA
ccccccagaagcgagttcaag

SEQ ID NO: 1917 - RNA, 21 nt, synthetic construct
  source 1..21: mol_type = other RNA
gcgcagatgaatgtgcatagt

SEQ ID NO: 1918 - RNA, 21 nt, synthetic construct
  source 1..21: mol_type = other RNA
agactgagagccgaggacatg

SEQ ID NO: 1919 - RNA, 21 nt, synthetic construct
  source 1..21: mol_type = other RNA
atgaacggcatcacaccccac

SEQ ID NO: 1920 - RNA, 21 nt, synthetic construct
  source 1..21: mol_type = other RNA
accgccatcggccagagcaac

SEQ ID NO: 1921 - RNA, 21 nt, synthetic construct
  source 1..21: mol_type = other RNA
ggagtttaccaaaacgtcagg

SEQ ID NO: 1922 - RNA, 21 nt, synthetic construct
  source 1..21: mol_type = other RNA
tcttactacgcaagcaaaact

SEQ ID NO: 1923 - RNA, 21 nt, synthetic construct
  source 1..21: mol_type = other RNA
gccacccggcagtcggaaggc

SEQ ID NO: 1924 - RNA, 21 nt, synthetic construct
  source 1..21: mol_type = other RNA
tctcagggggctaagtcgctt

SEQ ID NO: 1925 - RNA, 21 nt, synthetic construct
  source 1..21: mol_type = other RNA
ggttatgttattaagagttct

SEQ ID NO: 1926 - RNA, 21 nt, synthetic construct
  source 1..21: mol_type = other RNA
aacgtggccagcagcgccatg

SEQ ID NO: 1927 - RNA, 21 nt, synthetic construct
  source 1..21: mol_type = other RNA
ccgctcggcacagacttccac

SEQ ID NO: 1928 - RNA, 21 nt, synthetic construct
  source 1..21: mol_type = other RNA
ggtaatgttcttaagagttct

SEQ ID NO: 1929 - RNA, 21 nt, synthetic construct
  source 1..21: mol_type = other RNA
accatcgacaaggtgatcatg

SEQ ID NO: 1930 - RNA, 21 nt, synthetic construct
  source 1..21: mol_type = other RNA
gtgctccacggaaacgtcgca

SEQ ID NO: 1931 - RNA, 21 nt, synthetic construct
  source 1..21: mol_type = other RNA
ctccactacctgagtacagct

SEQ ID NO: 1932 - RNA, 21 nt, synthetic construct
  source 1..21: mol_type = other RNA
ccccccagaagcgagatcatg

SEQ ID NO: 1933 - RNA, 21 nt, synthetic construct
  source 1..21: mol_type = other RNA
cccgtgagaagcgccaacctg

SEQ ID NO: 1934 - RNA, 21 nt, synthetic construct
  source 1..21: mol_type = other RNA
gaccagatcagcaagaacatc

SEQ ID NO: 1935 - RNA, 21 nt, synthetic construct
  source 1..21: mol_type = other RNA
cacgtggtggccgtgggcgtg

SEQ ID NO: 1936 - RNA, 21 nt, synthetic construct
  source 1..21: mol_type = other RNA
ttcgttgaccaaaactcagtt

SEQ ID NO: 1937 - RNA, 21 nt, synthetic construct
  source 1..21: mol_type = other RNA
aagtattatgagagtactatt

SEQ ID NO: 1938 - RNA, 21 nt, synthetic construct
  source 1..21: mol_type = other RNA
aagatccaccaggacaacatg

SEQ ID NO: 1939 - RNA, 21 nt, synthetic construct
  source 1..21: mol_type = other RNA
aacaacagcgagggcagcaga

SEQ ID NO: 1940 - RNA, 21 nt, synthetic construct
  source 1..21: mol_type = other RNA
atcctgaacggcatggtgctg

SEQ ID NO: 1941 - RNA, 21 nt, synthetic construct
  source 1..21: mol_type = other RNA
aacgccgtgggcaccaagacc

SEQ ID NO: 1942 - RNA, 21 nt, synthetic construct
  source 1..21: mol_type = other RNA
gacaagaacgagagcaccggc

SEQ ID NO: 1943 - RNA, 21 nt, synthetic construct
  source 1..21: mol_type = other RNA
gacgtcatcaaacggctcggt

SEQ ID NO: 1944 - RNA, 21 nt, synthetic construct
  source 1..21: mol_type = other RNA
cttgtgaatgctgtgcctccg

SEQ ID NO: 1945 - RNA, 21 nt, synthetic construct
  source 1..21: mol_type = other RNA
tggaaagaaacccaaggcatc

SEQ ID NO: 1946 - RNA, 21 nt, synthetic construct
  source 1..21: mol_type = other RNA
agtattgtggataggactctg

SEQ ID NO: 1947 - RNA, 21 nt, synthetic construct
  source 1..21: mol_type = other RNA
cacttggtcagcgtgggcgtt

SEQ ID NO: 1948 - RNA, 21 nt, synthetic construct
  source 1..21: mol_type = other RNA
gcatacaacctgccatcttcc

SEQ ID NO: 1949 - RNA, 21 nt, synthetic construct
  source 1..21: mol_type = other RNA
agtatccaccaagtcataatg

SEQ ID NO: 1950 - RNA, 21 nt, synthetic construct
  source 1..21: mol_type = other RNA
ggtgtgtctgctacggttcag

SEQ ID NO: 1951 - RNA, 21 nt, synthetic construct
  source 1..21: mol_type = other RNA
ccaatagacagccacagcagc

SEQ ID NO: 1952 - RNA, 21 nt, synthetic construct
  source 1..21: mol_type = other RNA
gagaagagtccgactgtggtg

SEQ ID NO: 1953 - RNA, 21 nt, synthetic construct
  source 1..21: mol_type = other RNA
gagaagggtccgcttatttcg

SEQ ID NO: 1954 - RNA, 21 nt, synthetic construct
  source 1..21: mol_type = other RNA
gtgactactgggaatgggttt

SEQ ID NO: 1955 - RNA, 21 nt, synthetic construct
  source 1..21: mol_type = other RNA
aagaaccagcaggtgatcatg

SEQ ID NO: 1956 - RNA, 21 nt, synthetic construct
  source 1..21: mol_type = other RNA
ggcctgatgagcaagatcacc

SEQ ID NO: 1957 - RNA, 21 nt, synthetic construct
  source 1..21: mol_type = other RNA
gctaaccgattgtccatgacc

SEQ ID NO: 1958 - RNA, 21 nt, synthetic construct
  source 1..21: mol_type = other RNA
gcccccaacggcatcaagctg

SEQ ID NO: 1959 - DNA, 21 bp, synthetic construct
  source 1..21: mol_type = other DNA
caagtaggcagttccacctac

SEQ ID NO: 1960 - RNA, 21 nt, synthetic construct
  source 1..21: mol_type = other RNA
ggataccaagacaaccaacac

SEQ ID NO: 1961 - RNA, 21 nt, synthetic construct
  source 1..21: mol_type = other RNA
tggcagctgaccgagaacaga

SEQ ID NO: 1962 - RNA, 21 nt, synthetic construct
  source 1..21: mol_type = other RNA
gtgagcaagttcagaatggac

SEQ ID NO: 1963 - RNA, 21 nt, synthetic construct
  source 1..21: mol_type = other RNA
cggagtgtgacgacggagcag

SEQ ID NO: 1964 - DNA, 21 bp, synthetic construct
  source 1..21: mol_type = other DNA
ggctacggcccgagcggcatc

SEQ ID NO: 1965 - RNA, 21 nt, synthetic construct
  source 1..21: mol_type = other RNA
agtgaaagcaggaaagaagac

SEQ ID NO: 1966 - RNA, 21 nt, synthetic construct
  source 1..21: mol_type = other RNA
gggaggaataatgatactacg

SEQ ID NO: 1967 - RNA, 21 nt, synthetic construct
  source 1..21: mol_type = other RNA
gaagtcttcgaccaacggaga

SEQ ID NO: 1968 - RNA, 21 nt, synthetic construct
  source 1..21: mol_type = other RNA
tccggcgaacggaaccaagaa

SEQ ID NO: 1969 - RNA, 21 nt, synthetic construct
  source 1..21: mol_type = other RNA
ttccgcatcgactcaacaacc

SEQ ID NO: 1970 - RNA, 21 nt, synthetic construct
  source 1..21: mol_type = other RNA
aacgaaaacgaacaacaacct

SEQ ID NO: 1971 - RNA, 21 nt, synthetic construct
  source 1..21: mol_type = other RNA
cctccgcggggtgagaatgtg

SEQ ID NO: 1972 - RNA, 21 nt, synthetic construct
  source 1..21: mol_type = other RNA
gtcaccgcgatggccgtcaaa

SEQ ID NO: 1973 - RNA, 21 nt, synthetic construct
  source 1..21: mol_type = other RNA
gggttgagggcgaaggatatg

SEQ ID NO: 1974 - RNA, 21 nt, synthetic construct
  source 1..21: mol_type = other RNA
tctgggcttcgtcctcagatg

SEQ ID NO: 1975 - RNA, 21 nt, synthetic construct
  source 1..21: mol_type = other RNA
ggcatggccatcgtggagaac

SEQ ID NO: 1976 - RNA, 21 nt, synthetic construct
  source 1..21: mol_type = other RNA
ggcgtgaccgccagagtgcag

SEQ ID NO: 1977 - RNA, 21 nt, synthetic construct
  source 1..21: mol_type = other RNA
ggcgccagagaggagcacaag

SEQ ID NO: 1978 - RNA, 21 nt, synthetic construct
  source 1..21: mol_type = other RNA
gtgagggagcgtgatgggtat

SEQ ID NO: 1979 - RNA, 21 nt, synthetic construct
  source 1..21: mol_type = other RNA
aaccactacggcggcccccag

SEQ ID NO: 1980 - RNA, 21 nt, synthetic construct
  source 1..21: mol_type = other RNA
aggtcagtcaccaccgaacaa

SEQ ID NO: 1981 - RNA, 21 nt, synthetic construct
  source 1..21: mol_type = other RNA
gagatcgagaacggcgtgaga

SEQ ID NO: 1982 - DNA, 21 bp, synthetic construct
  source 1..21: mol_type = other DNA
agtatgtcaggcatcaccaac

SEQ ID NO: 1983 - RNA, 21 nt, synthetic construct
  source 1..21: mol_type = other RNA
gtgaaccacggcggcagcagc

SEQ ID NO: 1984 - RNA, 21 nt, synthetic construct
  source 1..21: mol_type = other RNA
tacaacagcgaagggacgaga

SEQ ID NO: 1985 - DNA, 21 bp, synthetic construct
  source 1..21: mol_type = other DNA
acgtcgccgaaaaaaaagtga

SEQ ID NO: 1986 - RNA, 21 nt, synthetic construct
  source 1..21: mol_type = other RNA
aaggctatgaatgggattgtt

SEQ ID NO: 1987 - RNA, 21 nt, synthetic construct
  source 1..21: mol_type = other RNA
acggaaactggcacgagcatg

SEQ ID NO: 1988 - RNA, 21 nt, synthetic construct
  source 1..21: mol_type = other RNA
ggggcttaccaaaacatgagg

SEQ ID NO: 1989 - RNA, 21 nt, synthetic construct
  source 1..21: mol_type = other RNA
gcgaggaatctgattgagggt

SEQ ID NO: 1990 - RNA, 21 nt, synthetic construct
  source 1..21: mol_type = other RNA
agcagaagcgagagcagcctg

SEQ ID NO: 1991 - RNA, 21 nt, synthetic construct
  source 1..21: mol_type = other RNA
agggaggaacgggatgcgcgg

SEQ ID NO: 1992 - RNA, 21 nt, synthetic construct
  source 1..21: mol_type = other RNA
agccaaatcataaaaagggaa

SEQ ID NO: 1993 - RNA, 21 nt, synthetic construct
  source 1..21: mol_type = other RNA
tctatgaacggcatcatcaac

SEQ ID NO: 1994 - RNA, 21 nt, synthetic construct
  source 1..21: mol_type = other RNA
agcaaggtggacatcaccctg

SEQ ID NO: 1995 - RNA, 21 nt, synthetic construct
  source 1..21: mol_type = other RNA
ggcctgaccggcaacagccac

SEQ ID NO: 1996 - RNA, 21 nt, synthetic construct
  source 1..21: mol_type = other RNA
aataggaatactcctgataat

SEQ ID NO: 1997 - DNA, 21 bp, synthetic construct
  source 1..21: mol_type = other DNA
gccggcaagggcagcgagctg

SEQ ID NO: 1998 - RNA, 21 nt, synthetic construct
  source 1..21: mol_type = other RNA
cctggtaaggagcagtcgtgg

SEQ ID NO: 1999 - RNA, 21 nt, synthetic construct
  source 1..21: mol_type = other RNA
ggtctggtgggtaatttttcg

SEQ ID NO: 2000 - RNA, 21 nt, synthetic construct
  source 1..21: mol_type = other RNA
ggcatcggtgggacgcgggaa

SEQ ID NO: 2001 - protein, 7 aa, synthetic construct
QIKPIER

SEQ ID NO: 2002 - protein, 7 aa, synthetic construct
IGQGVSV

SEQ ID NO: 2003 - protein, 7 aa, synthetic construct
PNNLHSS

SEQ ID NO: 2004 - protein, 7 aa, synthetic construct
QTSSDTR

SEQ ID NO: 2005 - protein, 7 aa, synthetic construct
VKIYGAL

SEQ ID NO: 2006 - protein, 7 aa, synthetic construct
GTGMAVK

SEQ ID NO: 2007 - protein, 7 aa, synthetic construct
QIRGTEM

SEQ ID NO: 2008 - protein, 7 aa, synthetic construct
NRNTSEK

SEQ ID NO: 2009 - protein, 7 aa, synthetic construct
AMRLSEG

SEQ ID NO: 2010 - protein, 7 aa, synthetic construct
LVKDVSQ

SEQ ID NO: 2011 - protein, 7 aa, synthetic construct
VSDSSNR

SEQ ID NO: 2012 - protein, 7 aa, synthetic construct
TINPSSS

SEQ ID NO: 2013 - protein, 7 aa, synthetic construct
VAREEHM

SEQ ID NO: 2014 - protein, 7 aa, synthetic construct
GVVNADR

SEQ ID NO: 2015 - protein, 7 aa, synthetic construct
TSSPPVV

SEQ ID NO: 2016 - protein, 7 aa, synthetic construct
RSDVVSD

SEQ ID NO: 2017 - protein, 7 aa, synthetic construct
PTRGENE

SEQ ID NO: 2018 - protein, 7 aa, synthetic construct
SGRNNSV

SEQ ID NO: 2019 - protein, 7 aa, synthetic construct
RNQNNSQ

SEQ ID NO: 2020 - protein, 7 aa, synthetic construct
VFQQGHV

SEQ ID NO: 2021 - protein, 7 aa, synthetic construct
NGQGVSF

SEQ ID NO: 2022 - protein, 7 aa, synthetic construct
TISPSSS

SEQ ID NO: 2023 - protein, 7 aa, synthetic construct
PKSETVL

SEQ ID NO: 2024 - protein, 7 aa, synthetic construct
MMKTETG

SEQ ID NO: 2025 - protein, 7 aa, synthetic construct
TIRQVNM

SEQ ID NO: 2026 - protein, 7 aa, synthetic construct
IGAMGGL

SEQ ID NO: 2027 - protein, 7 aa, synthetic construct
REKTEGL

SEQ ID NO: 2028 - protein, 7 aa, synthetic construct
ADRTRDG

SEQ ID NO: 2029 - protein, 7 aa, synthetic construct
GMQDVRI

SEQ ID NO: 2030 - protein, 7 aa, synthetic construct
PTRGENM

SEQ ID NO: 2031 - protein, 7 aa, synthetic construct
CQGAESR

SEQ ID NO: 2032 - protein, 7 aa, synthetic construct
QTTGGSS

SEQ ID NO: 2033 - protein, 7 aa, synthetic construct
VGSVRMD

SEQ ID NO: 2034 - protein, 7 aa, synthetic construct
MINRATT

SEQ ID NO: 2035 - protein, 7 aa, synthetic construct
GSLTQTH

SEQ ID NO: 2036 - protein, 7 aa, synthetic construct
GSMQTQN

SEQ ID NO: 2037 - protein, 7 aa, synthetic construct
ASTGIKL

SEQ ID NO: 2038 - protein, 7 aa, synthetic construct
GVSGRDQ

SEQ ID NO: 2039 - protein, 7 aa, synthetic construct
PGLSGKV

SEQ ID NO: 2040 - protein, 7 aa, synthetic construct
VKIYGAL

SEQ ID NO: 2041 - protein, 7 aa, synthetic construct
SESRQED

SEQ ID NO: 2042 - protein, 7 aa, synthetic construct
RHVHSKD

SEQ ID NO: 2043 - protein, 7 aa, synthetic construct
TISHVTN

SEQ ID NO: 2044 - protein, 7 aa, synthetic construct
GRHNETP

SEQ ID NO: 2045 - protein, 7 aa, synthetic construct
HVVAVGV

SEQ ID NO: 2046 - protein, 7 aa, synthetic construct
IGVGTKS

SEQ ID NO: 2047 - protein, 7 aa, synthetic construct
ETATKSI

SEQ ID NO: 2048 - protein, 7 aa, synthetic construct
PNLQQSQ

SEQ ID NO: 2049 - protein, 7 aa, synthetic construct
GYGDNQH

SEQ ID NO: 2050 - protein, 7 aa, synthetic construct
YQGAESR

SEQ ID NO: 2051 - protein, 7 aa, synthetic construct
PYDSPTS

SEQ ID NO: 2052 - protein, 7 aa, synthetic construct
GSKLATP

SEQ ID NO: 2053 - protein, 7 aa, synthetic construct
KAIDGIV

SEQ ID NO: 2054 - protein, 7 aa, synthetic construct
ARNVTEG

SEQ ID NO: 2055 - protein, 7 aa, synthetic construct
NSSVVKS

SEQ ID NO: 2056 - protein, 7 aa, synthetic construct
IGRIVNE

SEQ ID NO: 2057 - protein, 7 aa, synthetic construct
GIMRTQN

SEQ ID NO: 2058 - protein, 7 aa, synthetic construct
DVKSDTQ

SEQ ID NO: 2059 - protein, 7 aa, synthetic construct
DNMTKHV

SEQ ID NO: 2060 - protein, 7 aa, synthetic construct
KVEFNRV

SEQ ID NO: 2061 - protein, 7 aa, synthetic construct
MTIGNGF

SEQ ID NO: 2062 - protein, 7 aa, synthetic construct
VHAPGTH

SEQ ID NO: 2063 - protein, 7 aa, synthetic construct
GTIGNGF

SEQ ID NO: 2064 - protein, 7 aa, synthetic construct
PYNHPTS

SEQ ID NO: 2065 - protein, 7 aa, synthetic construct
PKPETAL

SEQ ID NO: 2066 - protein, 7 aa, synthetic construct
GYENNQH

SEQ ID NO: 2067 - protein, 7 aa, synthetic construct
PTRGENL

SEQ ID NO: 2068 - protein, 7 aa, synthetic construct
ATRLSEV

SEQ ID NO: 2069 - protein, 7 aa, synthetic construct
ERSGLGM

SEQ ID NO: 2070 - protein, 7 aa, synthetic construct
IMNGMVL

SEQ ID NO: 2071 - protein, 7 aa, synthetic construct
AGSESAI

SEQ ID NO: 2072 - protein, 7 aa, synthetic construct
PTRGENE

SEQ ID NO: 2073 - protein, 7 aa, synthetic construct
GGLPIAS

SEQ ID NO: 2074 - protein, 7 aa, synthetic construct
ERDGNNL

SEQ ID NO: 2075 - protein, 7 aa, synthetic construct
SLVQNAD

SEQ ID NO: 2076 - protein, 7 aa, synthetic construct
TGLAVHS

SEQ ID NO: 2077 - protein, 7 aa, synthetic construct
AATGIKL

SEQ ID NO: 2078 - protein, 7 aa, synthetic construct
SRTESSQ

SEQ ID NO: 2079 - protein, 7 aa, synthetic construct
SVTGGQL

SEQ ID NO: 2080 - protein, 7 aa, synthetic construct
PSRGENV

SEQ ID NO: 2081 - protein, 7 aa, synthetic construct
SGQSGKV

SEQ ID NO: 2082 - protein, 7 aa, synthetic construct
RNAPNMD

SEQ ID NO: 2083 - protein, 7 aa, synthetic construct
VLGAHSV

SEQ ID NO: 2084 - protein, 7 aa, synthetic construct
GGVSEGR

SEQ ID NO: 2085 - protein, 7 aa, synthetic construct
SSAMGGL

SEQ ID NO: 2086 - protein, 7 aa, synthetic construct
VNHGGEP

SEQ ID NO: 2087 - protein, 7 aa, synthetic construct
SIGGMVN

SEQ ID NO: 2088 - protein, 7 aa, synthetic construct
PGRETTT

SEQ ID NO: 2089 - protein, 7 aa, synthetic construct
TNQQDIM

SEQ ID NO: 2090 - protein, 7 aa, synthetic construct
DISAKHE

SEQ ID NO: 2091 - protein, 7 aa, synthetic construct
VDKSLVR

SEQ ID NO: 2092 - protein, 7 aa, synthetic construct
MNRGGEQ

SEQ ID NO: 2093 - protein, 7 aa, synthetic construct
VKVYGAL

SEQ ID NO: 2094 - protein, 7 aa, synthetic construct
GTNSEIV

SEQ ID NO: 2095 - protein, 7 aa, synthetic construct
RTGNSDI

SEQ ID NO: 2096 - protein, 7 aa, synthetic construct
FGYGSNN

SEQ ID NO: 2097 - protein, 7 aa, synthetic construct
SSQKTSL

SEQ ID NO: 2098 - protein, 7 aa, synthetic construct
DVENPGK

SEQ ID NO: 2099 - protein, 7 aa, synthetic construct
TSKPGTY

SEQ ID NO: 2100 - protein, 7 aa, synthetic construct
TGYADHS

SEQ ID NO: 2101 - protein, 7 aa, synthetic construct
SSEKIPR

SEQ ID NO: 2102 - protein, 7 aa, synthetic construct
MMEKMML

SEQ ID NO: 2103 - protein, 7 aa, synthetic construct
DLSRHTL

SEQ ID NO: 2104 - protein, 7 aa, synthetic construct
GYAHQDA

SEQ ID NO: 2105 - protein, 7 aa, synthetic construct
NRNTSDI

SEQ ID NO: 2106 - protein, 7 aa, synthetic construct
SGVSEAR

SEQ ID NO: 2107 - protein, 7 aa, synthetic construct
VNASAAN

SEQ ID NO: 2108 - protein, 7 aa, synthetic construct
VQKGILI

SEQ ID NO: 2109 - protein, 7 aa, synthetic construct
DSRALTE

SEQ ID NO: 2110 - protein, 7 aa, synthetic construct
NGVSSAM

SEQ ID NO: 2111 - protein, 7 aa, synthetic construct
DDGKYIR

SEQ ID NO: 2112 - protein, 7 aa, synthetic construct
TMSSADR

SEQ ID NO: 2113 - protein, 7 aa, synthetic construct
PGSSKVN

SEQ ID NO: 2114 - protein, 7 aa, synthetic construct
DVKSDTK

SEQ ID NO: 2115 - protein, 7 aa, synthetic construct
DDDSTTG

SEQ ID NO: 2116 - protein, 7 aa, synthetic construct
SVNGITN

SEQ ID NO: 2117 - protein, 7 aa, synthetic construct
DVENPGK

SEQ ID NO: 2118 - protein, 7 aa, synthetic construct
GIAIVEN

SEQ ID NO: 2119 - protein, 7 aa, synthetic construct
GYVLKSP

SEQ ID NO: 2120 - protein, 7 aa, synthetic construct
QVKSTET

SEQ ID NO: 2121 - protein, 7 aa, synthetic construct
PSVNLGV

SEQ ID NO: 2122 - protein, 7 aa, synthetic construct
AKAPEAG

SEQ ID NO: 2123 - protein, 7 aa, synthetic construct
TIERTAM

SEQ ID NO: 2124 - protein, 7 aa, synthetic construct
QQRVSSS

SEQ ID NO: 2125 - protein, 7 aa, synthetic construct
QIYNTAH

SEQ ID NO: 2126 - protein, 7 aa, synthetic construct
GLGGPRE

SEQ ID NO: 2127 - protein, 7 aa, synthetic construct
VLSPNIA

SEQ ID NO: 2128 - protein, 7 aa, synthetic construct
NVVSSVM

SEQ ID NO: 2129 - protein, 7 aa, synthetic construct
GNNLATP

SEQ ID NO: 2130 - protein, 7 aa, synthetic construct
GNKLHID

SEQ ID NO: 2131 - protein, 7 aa, synthetic construct
MYYERTI

SEQ ID NO: 2132 - protein, 7 aa, synthetic construct
RKEPMIL

SEQ ID NO: 2133 - protein, 7 aa, synthetic construct
TLNGAYK

SEQ ID NO: 2134 - protein, 7 aa, synthetic construct
TIHQGIK

SEQ ID NO: 2135 - protein, 7 aa, synthetic construct
IGWNNSV

SEQ ID NO: 2136 - protein, 7 aa, synthetic construct
GFAHQDA

SEQ ID NO: 2137 - protein, 7 aa, synthetic construct
QIRGMEV

SEQ ID NO: 2138 - protein, 7 aa, synthetic construct
TIERTAN

SEQ ID NO: 2139 - protein, 7 aa, synthetic construct
IGKQTYD

SEQ ID NO: 2140 - protein, 7 aa, synthetic construct
SLGNIQS

SEQ ID NO: 2141 - protein, 7 aa, synthetic construct
TSHQVSM

SEQ ID NO: 2142 - protein, 7 aa, synthetic construct
HAPPAMV

SEQ ID NO: 2143 - protein, 7 aa, synthetic construct
KIDTFKV

SEQ ID NO: 2144 - protein, 7 aa, synthetic construct
GQARVPT

SEQ ID NO: 2145 - protein, 7 aa, synthetic construct
DKAPETG

SEQ ID NO: 2146 - protein, 7 aa, synthetic construct
AATGIKL

SEQ ID NO: 2147 - protein, 7 aa, synthetic construct
PTRGESV

SEQ ID NO: 2148 - protein, 7 aa, synthetic construct
MINRVST

SEQ ID NO: 2149 - protein, 7 aa, synthetic construct
TRSPPVS

SEQ ID NO: 2150 - protein, 7 aa, synthetic construct
LNVAGLM

SEQ ID NO: 2151 - protein, 7 aa, synthetic construct
RTSNSDV

SEQ ID NO: 2152 - protein, 7 aa, synthetic construct
QVLKNGA

SEQ ID NO: 2153 - protein, 7 aa, synthetic construct
QRSTSVG

SEQ ID NO: 2154 - protein, 7 aa, synthetic construct
SVTGGRS

SEQ ID NO: 2155 - protein, 7 aa, synthetic construct
SKVQNVD

SEQ ID NO: 2156 - protein, 7 aa, synthetic construct
VFQQVHV

SEQ ID NO: 2157 - protein, 7 aa, synthetic construct
SGERNQE

SEQ ID NO: 2158 - protein, 7 aa, synthetic construct
GYGLTGN

SEQ ID NO: 2159 - protein, 7 aa, synthetic construct
SKNGITN

SEQ ID NO: 2160 - protein, 7 aa, synthetic construct
RDRWNSE

SEQ ID NO: 2161 - protein, 7 aa, synthetic construct
GYEENQQ

SEQ ID NO: 2162 - protein, 7 aa, synthetic construct
TGKGIVL

SEQ ID NO: 2163 - protein, 7 aa, synthetic construct
VISAKHE

SEQ ID NO: 2164 - protein, 7 aa, synthetic construct
EKSPPVM

SEQ ID NO: 2165 - protein, 7 aa, synthetic construct
GVIKTLL

SEQ ID NO: 2166 - protein, 7 aa, synthetic construct
GNEHNQH

SEQ ID NO: 2167 - protein, 7 aa, synthetic construct
EYGAHSV

SEQ ID NO: 2168 - protein, 7 aa, synthetic construct
QLSNTST

SEQ ID NO: 2169 - protein, 7 aa, synthetic construct
NRDDYNH

SEQ ID NO: 2170 - protein, 7 aa, synthetic construct
SGTQDTR

SEQ ID NO: 2171 - protein, 7 aa, synthetic construct
SQAAESH

SEQ ID NO: 2172 - protein, 7 aa, synthetic construct
NSGDKQL

SEQ ID NO: 2173 - protein, 7 aa, synthetic construct
GQMRSDV

SEQ ID NO: 2174 - protein, 7 aa, synthetic construct
GLVQNVD

SEQ ID NO: 2175 - protein, 7 aa, synthetic construct
GYGFSGN

SEQ ID NO: 2176 - protein, 7 aa, synthetic construct
LVSDMAK

SEQ ID NO: 2177 - protein, 7 aa, synthetic construct
TSPNNSV

SEQ ID NO: 2178 - protein, 7 aa, synthetic construct
GTLPNKA

SEQ ID NO: 2179 - protein, 7 aa, synthetic construct
GMSRVSD

SEQ ID NO: 2180 - protein, 7 aa, synthetic construct
GGAGLKD

SEQ ID NO: 2181 - protein, 7 aa, synthetic construct
GQSRVPM

SEQ ID NO: 2182 - protein, 7 aa, synthetic construct
TGKGVEL

SEQ ID NO: 2183 - protein, 7 aa, synthetic construct
VTQAQAQ

SEQ ID NO: 2184 - protein, 7 aa, synthetic construct
KDRNDNA

SEQ ID NO: 2185 - protein, 7 aa, synthetic construct
RTSNSDV

SEQ ID NO: 2186 - protein, 7 aa, synthetic construct
DKVGVAV

SEQ ID NO: 2187 - protein, 7 aa, synthetic construct
SISHVIN

SEQ ID NO: 2188 - protein, 7 aa, synthetic construct
TINKVII

SEQ ID NO: 2189 - protein, 7 aa, synthetic construct
GARGEHM

SEQ ID NO: 2190 - protein, 7 aa, synthetic construct
PTRGVNV

SEQ ID NO: 2191 - protein, 7 aa, synthetic construct
GIQANAH

SEQ ID NO: 2192 - protein, 7 aa, synthetic construct
GMTQKMM

SEQ ID NO: 2193 - protein, 7 aa, synthetic construct
PINQVIM

SEQ ID NO: 2194 - protein, 7 aa, synthetic construct
VIATKSI

SEQ ID NO: 2195 - protein, 7 aa, synthetic construct
QTKVDSV

SEQ ID NO: 2196 - protein, 7 aa, synthetic construct
GTYSEMV

SEQ ID NO: 2197 - protein, 7 aa, synthetic construct
GVNQNMR

SEQ ID NO: 2198 - protein, 7 aa, synthetic construct
SEKNEGL

SEQ ID NO: 2199 - protein, 7 aa, synthetic construct
PDVRISV

SEQ ID NO: 2200 - protein, 7 aa, synthetic construct
SLGNIQS

SEQ ID NO: 2201 - protein, 7 aa, synthetic construct
KMTGGDF

SEQ ID NO: 2202 - protein, 7 aa, synthetic construct
RLSGLEV

SEQ ID NO: 2203 - protein, 7 aa, synthetic construct
IRDQTAI

SEQ ID NO: 2204 - protein, 7 aa, synthetic construct
YVKSSET

SEQ ID NO: 2205 - protein, 7 aa, synthetic construct
FNNNSQM

SEQ ID NO: 2206 - protein, 7 aa, synthetic construct
IKETMKL

SEQ ID NO: 2207 - protein, 7 aa, synthetic construct
VERGVTP

SEQ ID NO: 2208 - protein, 7 aa, synthetic construct
EKGPLVA

SEQ ID NO: 2209 - protein, 7 aa, synthetic construct
RTSNGDI

SEQ ID NO: 2210 - protein, 7 aa, synthetic construct
GYVLKSA

SEQ ID NO: 2211 - protein, 7 aa, synthetic construct
SMNGVTN

SEQ ID NO: 2212 - protein, 7 aa, synthetic construct
VTTLGAV

SEQ ID NO: 2213 - protein, 7 aa, synthetic construct
SRDDTVF

SEQ ID NO: 2214 - protein, 7 aa, synthetic construct
RSPNNSE

SEQ ID NO: 2215 - protein, 7 aa, synthetic construct
PRLDVNR

SEQ ID NO: 2216 - protein, 7 aa, synthetic construct
EKGPHIA

SEQ ID NO: 2217 - protein, 7 aa, synthetic construct
SSQKNKP

SEQ ID NO: 2218 - protein, 7 aa, synthetic construct
NKNTSDN

SEQ ID NO: 2219 - protein, 7 aa, synthetic construct
AKEMRAL

SEQ ID NO: 2220 - protein, 7 aa, synthetic construct
DKNASTG

SEQ ID NO: 2221 - protein, 7 aa, synthetic construct
RSVWTEQ

SEQ ID NO: 2222 - protein, 7 aa, synthetic construct
GYQDNQH

SEQ ID NO: 2223 - protein, 7 aa, synthetic construct
AMNGITN

SEQ ID NO: 2224 - protein, 7 aa, synthetic construct
RKDVMNV

SEQ ID NO: 2225 - protein, 7 aa, synthetic construct
VNASAAN

SEQ ID NO: 2226 - protein, 7 aa, synthetic construct
LRVRDGY

SEQ ID NO: 2227 - protein, 7 aa, synthetic construct
VSATKSN

SEQ ID NO: 2228 - protein, 7 aa, synthetic construct
GIQAKAN

SEQ ID NO: 2229 - protein, 7 aa, synthetic construct
RLNHVDT

SEQ ID NO: 2230 - protein, 7 aa, synthetic construct
TLLPGYL

SEQ ID NO: 2231 - protein, 7 aa, synthetic construct
GTLPNKA

SEQ ID NO: 2232 - protein, 7 aa, synthetic construct
QVLINGA

SEQ ID NO: 2233 - protein, 7 aa, synthetic construct
SGDSVRA

SEQ ID NO: 2234 - protein, 7 aa, synthetic construct
PTRGENE

SEQ ID NO: 2235 - protein, 7 aa, synthetic construct
QDGSSTV

SEQ ID NO: 2236 - protein, 7 aa, synthetic construct
NNQRNPL

SEQ ID NO: 2237 - protein, 7 aa, synthetic construct
SKSNETI

SEQ ID NO: 2238 - protein, 7 aa, synthetic construct
SLLKNVD

SEQ ID NO: 2239 - protein, 7 aa, synthetic construct
KVVTSAM

SEQ ID NO: 2240 - protein, 7 aa, synthetic construct
ANIECAV

SEQ ID NO: 2241 - protein, 7 aa, synthetic construct
ARNVIGG

SEQ ID NO: 2242 - protein, 7 aa, synthetic construct
VLSPNNV

SEQ ID NO: 2243 - protein, 7 aa, synthetic construct
MKEKIIL

SEQ ID NO: 2244 - protein, 7 aa, synthetic construct
NGERNQV

SEQ ID NO: 2245 - protein, 7 aa, synthetic construct
GSLNNAS

SEQ ID NO: 2246 - protein, 7 aa, synthetic construct
MHHASKE

SEQ ID NO: 2247 - protein, 7 aa, synthetic construct
EKSPTVM

SEQ ID NO: 2248 - protein, 7 aa, synthetic construct
LSKVDSV

SEQ ID NO: 2249 - protein, 7 aa, synthetic construct
GSNLTTP

SEQ ID NO: 2250 - protein, 7 aa, synthetic construct
VENGVDK

SEQ ID NO: 2251 - protein, 7 aa, synthetic construct
LKVAGLT

SEQ ID NO: 2252 - protein, 7 aa, synthetic construct
SGVSDGR

SEQ ID NO: 2253 - protein, 7 aa, synthetic construct
SRDDTIS

SEQ ID NO: 2254 - protein, 7 aa, synthetic construct
VNHGGVQ

SEQ ID NO: 2255 - protein, 7 aa, synthetic construct
DVKNPGK

SEQ ID NO: 2256 - protein, 7 aa, synthetic construct
HVKSYDT

SEQ ID NO: 2257 - protein, 7 aa, synthetic construct
SESKQIA

SEQ ID NO: 2258 - protein, 7 aa, synthetic construct
SQGPESL

SEQ ID NO: 2259 - protein, 7 aa, synthetic construct
QIRAMEK

SEQ ID NO: 2260 - protein, 7 aa, synthetic construct
TETGTLL

SEQ ID NO: 2261 - protein, 7 aa, synthetic construct
DLRTSTL

SEQ ID NO: 2262 - protein, 7 aa, synthetic construct
TKYNESL

SEQ ID NO: 2263 - protein, 7 aa, synthetic construct
ARNLNEG

SEQ ID NO: 2264 - protein, 7 aa, synthetic construct
GGYQNMR

SEQ ID NO: 2265 - protein, 7 aa, synthetic construct
TIEAPAM

SEQ ID NO: 2266 - protein, 7 aa, synthetic construct
VDQKSVT

SEQ ID NO: 2267 - protein, 7 aa, synthetic construct
SYLPQVT

SEQ ID NO: 2268 - protein, 7 aa, synthetic construct
GYVVKSS

SEQ ID NO: 2269 - protein, 7 aa, synthetic construct
IGQGVSV

SEQ ID NO: 2270 - protein, 7 aa, synthetic construct
VDRTTDG

SEQ ID NO: 2271 - protein, 7 aa, synthetic construct
VTIGNGL

SEQ ID NO: 2272 - protein, 7 aa, synthetic construct
KREHDGY

SEQ ID NO: 2273 - protein, 7 aa, synthetic construct
GVNSTLQ

SEQ ID NO: 2274 - protein, 7 aa, synthetic construct
VVHVNVA

SEQ ID NO: 2275 - protein, 7 aa, synthetic construct
AVLPIAS

SEQ ID NO: 2276 - protein, 7 aa, synthetic construct
VRAPDTH

SEQ ID NO: 2277 - protein, 7 aa, synthetic construct
HDKSSEN

SEQ ID NO: 2278 - protein, 7 aa, synthetic construct
MEHRNDG

SEQ ID NO: 2279 - protein, 7 aa, synthetic construct
SGAMGRL

SEQ ID NO: 2280 - protein, 7 aa, synthetic construct
TLPNNSE

SEQ ID NO: 2281 - protein, 7 aa, synthetic construct
FLNGVVL

SEQ ID NO: 2282 - protein, 7 aa, synthetic construct
LGTSVGS

SEQ ID NO: 2283 - protein, 7 aa, synthetic construct
YFAPEMS

SEQ ID NO: 2284 - protein, 7 aa, synthetic construct
TIQQDNM

SEQ ID NO: 2285 - protein, 7 aa, synthetic construct
TVSHVIN

SEQ ID NO: 2286 - protein, 7 aa, synthetic construct
VNVQAER

SEQ ID NO: 2287 - protein, 7 aa, synthetic construct
TINQLIM

SEQ ID NO: 2288 - protein, 7 aa, synthetic construct
LMNGITN

SEQ ID NO: 2289 - protein, 7 aa, synthetic construct
NVVSSAL

SEQ ID NO: 2290 - protein, 7 aa, synthetic construct
TIHLDIM

SEQ ID NO: 2291 - protein, 7 aa, synthetic construct
IAVGAKS

SEQ ID NO: 2292 - protein, 7 aa, synthetic construct
ADGLLKM

SEQ ID NO: 2293 - protein, 7 aa, synthetic construct
LVDHNSV

SEQ ID NO: 2294 - protein, 7 aa, synthetic construct
PGKEQLL

SEQ ID NO: 2295 - protein, 7 aa, synthetic construct
TSSPPDS

SEQ ID NO: 2296 - protein, 7 aa, synthetic construct
MLARVVP

SEQ ID NO: 2297 - protein, 7 aa, synthetic construct
DKNPATG

SEQ ID NO: 2298 - protein, 7 aa, synthetic construct
IYDYSHT

SEQ ID NO: 2299 - protein, 7 aa, synthetic construct
GRHNEIT

SEQ ID NO: 2300 - protein, 7 aa, synthetic construct
EIKDRVL

SEQ ID NO: 2301 - protein, 7 aa, synthetic construct
SGFAVHS

SEQ ID NO: 2302 - protein, 7 aa, synthetic construct
VKVYGAL

SEQ ID NO: 2303 - protein, 7 aa, synthetic construct
SLLPGYH

SEQ ID NO: 2304 - protein, 7 aa, synthetic construct
DYPSRGI

SEQ ID NO: 2305 - protein, 7 aa, synthetic construct
APTGIKS

SEQ ID NO: 2306 - protein, 7 aa, synthetic construct
ALIVGQK

SEQ ID NO: 2307 - protein, 7 aa, synthetic construct
KLGHNYG

SEQ ID NO: 2308 - protein, 7 aa, synthetic construct
SLVQKVE

SEQ ID NO: 2309 - protein, 7 aa, synthetic construct
KLAHNYD

SEQ ID NO: 2310 - protein, 7 aa, synthetic construct
QVGSATV

SEQ ID NO: 2311 - protein, 7 aa, synthetic construct
LDMSQRG

SEQ ID NO: 2312 - protein, 7 aa, synthetic construct
INEQAER

SEQ ID NO: 2313 - protein, 7 aa, synthetic construct
LVNDVTQ

SEQ ID NO: 2314 - protein, 7 aa, synthetic construct
RSLNNAT

SEQ ID NO: 2315 - protein, 7 aa, synthetic construct
VVLPIAS

SEQ ID NO: 2316 - protein, 7 aa, synthetic construct
VSQEPSR

SEQ ID NO: 2317 - protein, 7 aa, synthetic construct
DKSAATG

SEQ ID NO: 2318 - protein, 7 aa, synthetic construct
RDGVILI

SEQ ID NO: 2319 - protein, 7 aa, synthetic construct
ALSVGQK

SEQ ID NO: 2320 - protein, 7 aa, synthetic construct
GLQPNVS

SEQ ID NO: 2321 - protein, 7 aa, synthetic construct
GLRGEDM

SEQ ID NO: 2322 - protein, 7 aa, synthetic construct
LSQKTSL

SEQ ID NO: 2323 - protein, 7 aa, synthetic construct
GINLATP

SEQ ID NO: 2324 - protein, 7 aa, synthetic construct
PENTKIN

SEQ ID NO: 2325 - protein, 7 aa, synthetic construct
SMYGITN

SEQ ID NO: 2326 - protein, 7 aa, synthetic construct
MNGVSPH

SEQ ID NO: 2327 - protein, 7 aa, synthetic construct
KDTQHLN

SEQ ID NO: 2328 - protein, 7 aa, synthetic construct
LANHTEI

SEQ ID NO: 2329 - protein, 7 aa, synthetic construct
RTSNSEI

SEQ ID NO: 2330 - protein, 7 aa, synthetic construct
GYGLKSS

SEQ ID NO: 2331 - protein, 7 aa, synthetic construct
GLSQKMM

SEQ ID NO: 2332 - protein, 7 aa, synthetic construct
ADVRNSV

SEQ ID NO: 2333 - protein, 7 aa, synthetic construct
PFDSPST

SEQ ID NO: 2334 - protein, 7 aa, synthetic construct
QVKSSET

SEQ ID NO: 2335 - protein, 7 aa, synthetic construct
SDAASKV

SEQ ID NO: 2336 - protein, 7 aa, synthetic construct
SLMPGYH

SEQ ID NO: 2337 - protein, 7 aa, synthetic construct
WHLTENW

SEQ ID NO: 2338 - protein, 7 aa, synthetic construct
QYEVVNR

SEQ ID NO: 2339 - protein, 7 aa, synthetic construct
RDRGNSD

SEQ ID NO: 2340 - protein, 7 aa, synthetic construct
GLTGYSR

SEQ ID NO: 2341 - protein, 7 aa, synthetic construct
TINQVII

SEQ ID NO: 2342 - protein, 7 aa, synthetic construct
VLRPNIV

SEQ ID NO: 2343 - protein, 7 aa, synthetic construct
HVENPGK

SEQ ID NO: 2344 - protein, 7 aa, synthetic construct
VNVQAER

SEQ ID NO: 2345 - protein, 7 aa, synthetic construct
VKNYGAL

SEQ ID NO: 2346 - protein, 7 aa, synthetic construct
VREPGTH

SEQ ID NO: 2347 - protein, 7 aa, synthetic construct
PNNLTSS

SEQ ID NO: 2348 - protein, 7 aa, synthetic construct
QLSSTST

SEQ ID NO: 2349 - protein, 7 aa, synthetic construct
GYGLSGS

SEQ ID NO: 2350 - protein, 7 aa, synthetic construct
GKAIVEN

SEQ ID NO: 2351 - protein, 7 aa, synthetic construct
GLVGTRE

SEQ ID NO: 2352 - protein, 7 aa, synthetic construct
DKNAATG

SEQ ID NO: 2353 - protein, 7 aa, synthetic construct
KWTVNHE

SEQ ID NO: 2354 - protein, 7 aa, synthetic construct
IHGIAPS

SEQ ID NO: 2355 - protein, 7 aa, synthetic construct
GTLPNMA

SEQ ID NO: 2356 - protein, 7 aa, synthetic construct
LEKNGLI

SEQ ID NO: 2357 - protein, 7 aa, synthetic construct
LKVAGLT

SEQ ID NO: 2358 - protein, 7 aa, synthetic construct
GVSARFQ

SEQ ID NO: 2359 - protein, 7 aa, synthetic construct
GLTVYSH

SEQ ID NO: 2360 - protein, 7 aa, synthetic construct
KINTFKV

SEQ ID NO: 2361 - protein, 7 aa, synthetic construct
EIYNTAL

SEQ ID NO: 2362 - protein, 7 aa, synthetic construct
MLAHVVT

SEQ ID NO: 2363 - protein, 7 aa, synthetic construct
VTIVNGI

SEQ ID NO: 2364 - protein, 7 aa, synthetic construct
DVKSDTQ

SEQ ID NO: 2365 - protein, 7 aa, synthetic construct
EIYNTVH

SEQ ID NO: 2366 - protein, 7 aa, synthetic construct
TVMQKSS

SEQ ID NO: 2367 - protein, 7 aa, synthetic construct
GVEKADR

SEQ ID NO: 2368 - protein, 7 aa, synthetic construct
RNYSTLV

SEQ ID NO: 2369 - protein, 7 aa, synthetic construct
ETIGNGY

SEQ ID NO: 2370 - protein, 7 aa, synthetic construct
VSQAQAQ

SEQ ID NO: 2371 - protein, 7 aa, synthetic construct
LVRNGRE

SEQ ID NO: 2372 - protein, 7 aa, synthetic construct
NRNTSEK

SEQ ID NO: 2373 - protein, 7 aa, synthetic construct
QSRGMEM

SEQ ID NO: 2374 - protein, 7 aa, synthetic construct
LDTQHLI

SEQ ID NO: 2375 - protein, 7 aa, synthetic construct
VLAPGTH

SEQ ID NO: 2376 - protein, 7 aa, synthetic construct
AMSLSEG

SEQ ID NO: 2377 - protein, 7 aa, synthetic construct
QTSRDTR

SEQ ID NO: 2378 - protein, 7 aa, synthetic construct
TSSHPVV

SEQ ID NO: 2379 - protein, 7 aa, synthetic construct
AMRLREG

SEQ ID NO: 2380 - protein, 7 aa, synthetic construct
DAREEHM

SEQ ID NO: 2381 - protein, 7 aa, synthetic construct
TSSPPWC

SEQ ID NO: 2382 - protein, 7 aa, synthetic construct
NRNTREK

SEQ ID NO: 2383 - protein, 7 aa, synthetic construct
QTSSDTR

SEQ ID NO: 2384 - protein, 7 aa, synthetic construct
LNVAGLS

SEQ ID NO: 2385 - protein, 7 aa, synthetic construct
QTTSDTR

SEQ ID NO: 2386 - protein, 7 aa, synthetic construct
VKIYGAR

SEQ ID NO: 2387 - protein, 7 aa, synthetic construct
QKSSDTR

SEQ ID NO: 2388 - protein, 7 aa, synthetic construct
AKRLSEG

SEQ ID NO: 2389 - protein, 7 aa, synthetic construct
VASEEHM

SEQ ID NO: 2390 - protein, 7 aa, synthetic construct
QTSSETR

SEQ ID NO: 2391 - protein, 7 aa, synthetic construct
AMRHSEG

SEQ ID NO: 2392 - protein, 7 aa, synthetic construct
VAREEHK

SEQ ID NO: 2393 - protein, 7 aa, synthetic construct
EMRLSEG

SEQ ID NO: 2394 - protein, 7 aa, synthetic construct
VAREEHM

SEQ ID NO: 2395 - protein, 7 aa, synthetic construct
GSKQTQN

SEQ ID NO: 2396 - protein, 7 aa, synthetic construct
VAREEHM

SEQ ID NO: 2397 - protein, 7 aa, synthetic construct
GYMQTQN

SEQ ID NO: 2398 - protein, 7 aa, synthetic construct
QTSSDTR

SEQ ID NO: 2399 - protein, 7 aa, synthetic construct
TSSPPVE

SEQ ID NO: 2400 - protein, 7 aa, synthetic construct
QIRGTEM

SEQ ID NO: 2401 - protein, 7 aa, synthetic construct
AMRLSEG

SEQ ID NO: 2402 - protein, 7 aa, synthetic construct
TSSPPEV

SEQ ID NO: 2403 - protein, 7 aa, synthetic construct
VFQQGHD

SEQ ID NO: 2404 - protein, 7 aa, synthetic construct
AMRLSEG

SEQ ID NO: 2405 - protein, 7 aa, synthetic construct
VAREEQM

SEQ ID NO: 2406 - protein, 7 aa, synthetic construct
VAREENM

SEQ ID NO: 2407 - protein, 7 aa, synthetic construct
GSMKTQN

SEQ ID NO: 2408 - protein, 7 aa, synthetic construct
VDREEHM

SEQ ID NO: 2409 - protein, 7 aa, synthetic construct
VRDSSNR

SEQ ID NO: 2410 - protein, 7 aa, synthetic construct
QTSSDNR

SEQ ID NO: 2411 - protein, 7 aa, synthetic construct
ESDSSNR

SEQ ID NO: 2412 - protein, 7 aa, synthetic construct
GRHNETP

SEQ ID NO: 2413 - protein, 7 aa, synthetic construct
TSSPPVV

SEQ ID NO: 2414 - protein, 7 aa, synthetic construct
NGQGVSY

SEQ ID NO: 2415 - protein, 7 aa, synthetic construct
AMRISEG

SEQ ID NO: 2416 - protein, 7 aa, synthetic construct
QTYSDTR

SEQ ID NO: 2417 - protein, 7 aa, synthetic construct
AMRVSEG

SEQ ID NO: 2418 - protein, 7 aa, synthetic construct
GTGMAVK

SEQ ID NO: 2419 - protein, 7 aa, synthetic construct
GTGMAEK

SEQ ID NO: 2420 - protein, 7 aa, synthetic construct
QTTGGSR

SEQ ID NO: 2421 - protein, 7 aa, synthetic construct
TSSPPVV

SEQ ID NO: 2422 - protein, 7 aa, synthetic construct
NRNNSEK

SEQ ID NO: 2423 - protein, 7 aa, synthetic construct
GSMQTQN

SEQ ID NO: 2424 - protein, 7 aa, synthetic construct
QTTGDPV

SEQ ID NO: 2425 - protein, 7 aa, synthetic construct
KTSSDTR

SEQ ID NO: 2426 - protein, 7 aa, synthetic construct
NGQGVSF

SEQ ID NO: 2427 - protein, 7 aa, synthetic construct
VSDSRNR

SEQ ID NO: 2428 - protein, 7 aa, synthetic construct
NGQGVSF

SEQ ID NO: 2429 - protein, 7 aa, synthetic construct
HGLSGKV

SEQ ID NO: 2430 - protein, 7 aa, synthetic construct
NGQGVSI

SEQ ID NO: 2431 - protein, 7 aa, synthetic construct
AMRRSEG

SEQ ID NO: 2432 - protein, 7 aa, synthetic construct
TSSTPVV

SEQ ID NO: 2433 - protein, 7 aa, synthetic construct
GSMQKQN

SEQ ID NO: 2434 - protein, 7 aa, synthetic construct
TSSPHVV

SEQ ID NO: 2435 - protein, 7 aa, synthetic construct
TSSPTVV

SEQ ID NO: 2436 - protein, 7 aa, synthetic construct
AMRLSEG

SEQ ID NO: 2437 - protein, 7 aa, synthetic construct
GTGMDVK

SEQ ID NO: 2438 - protein, 7 aa, synthetic construct
GTMQTQN

SEQ ID NO: 2439 - protein, 7 aa, synthetic construct
PGLSGKE

SEQ ID NO: 2440 - protein, 7 aa, synthetic construct
KGQGVSF

SEQ ID NO: 2441 - protein, 7 aa, synthetic construct
KMKTETG

SEQ ID NO: 2442 - protein, 7 aa, synthetic construct
MKKTETG

SEQ ID NO: 2443 - protein, 7 aa, synthetic construct
TISHSSS

SEQ ID NO: 2444 - protein, 7 aa, synthetic construct
VSDRSNR

SEQ ID NO: 2445 - protein, 7 aa, synthetic construct
SGRNNSE

SEQ ID NO: 2446 - protein, 7 aa, synthetic construct
HNLQQSQ

SEQ ID NO: 2447 - protein, 7 aa, synthetic construct
GMQDVRI

SEQ ID NO: 2448 - protein, 7 aa, synthetic construct
GTGKAVK

SEQ ID NO: 2449 - protein, 7 aa, synthetic construct
QIKQIER

SEQ ID NO: 2450 - protein, 7 aa, synthetic construct
ASTGIKL

SEQ ID NO: 2451 - protein, 7 aa, synthetic construct
AMRLSER

SEQ ID NO: 2452 - protein, 7 aa, synthetic construct
GTGMAMK

SEQ ID NO: 2453 - protein, 7 aa, synthetic construct
GSMQTQK

SEQ ID NO: 2454 - protein, 7 aa, synthetic construct
QTSTDTR

SEQ ID NO: 2455 - protein, 7 aa, synthetic construct
PYDSHTS

SEQ ID NO: 2456 - protein, 7 aa, synthetic construct
NGQGDSF

SEQ ID NO: 2457 - protein, 7 aa, synthetic construct
MMKTETG

SEQ ID NO: 2458 - protein, 7 aa, synthetic construct
GVVNDDR

SEQ ID NO: 2459 - protein, 7 aa, synthetic construct
QTSSDSR

SEQ ID NO: 2460 - protein, 7 aa, synthetic construct
TSSPPRG

SEQ ID NO: 2461 - protein, 7 aa, synthetic construct
NGQGVSL

SEQ ID NO: 2462 - protein, 7 aa, synthetic construct
QTTGGYS

SEQ ID NO: 2463 - protein, 7 aa, synthetic construct
QTSSDTG

SEQ ID NO: 2464 - protein, 7 aa, synthetic construct
IGQGVSE

SEQ ID NO: 2465 - protein, 7 aa, synthetic construct
NGQGVYF

SEQ ID NO: 2466 - protein, 7 aa, synthetic construct
RSDVVRD

SEQ ID NO: 2467 - protein, 7 aa, synthetic construct
IGQGESV

SEQ ID NO: 2468 - protein, 7 aa, synthetic construct
NRKTSEK

SEQ ID NO: 2469 - protein, 7 aa, synthetic construct
NGQGVSF

SEQ ID NO: 2470 - protein, 7 aa, synthetic construct
AMRLSEW

SEQ ID NO: 2471 - protein, 7 aa, synthetic construct
VLQQGHV

SEQ ID NO: 2472 - protein, 7 aa, synthetic construct
NGQGVSF

SEQ ID NO: 2473 - protein, 7 aa, synthetic construct
RSDEVSD

SEQ ID NO: 2474 - protein, 7 aa, synthetic construct
TSRPPVV

SEQ ID NO: 2475 - protein, 7 aa, synthetic construct
VFQQGHV

SEQ ID NO: 2476 - protein, 7 aa, synthetic construct
QIRGTEK

SEQ ID NO: 2477 - protein, 7 aa, synthetic construct
AMRLSEV

SEQ ID NO: 2478 - protein, 7 aa, synthetic construct
VFKQGHV

SEQ ID NO: 2479 - protein, 7 aa, synthetic construct
QTSSDTR

SEQ ID NO: 2480 - protein, 7 aa, synthetic construct
VAREEHM

SEQ ID NO: 2481 - protein, 7 aa, synthetic construct
ASTGIKQ

SEQ ID NO: 2482 - protein, 7 aa, synthetic construct
NGKGVSF

SEQ ID NO: 2483 - protein, 7 aa, synthetic construct
TSSPPLV

SEQ ID NO: 2484 - protein, 7 aa, synthetic construct
QTTGGTS

SEQ ID NO: 2485 - protein, 7 aa, synthetic construct
QPSSDTR

SEQ ID NO: 2486 - protein, 7 aa, synthetic construct
QTTGGSS

SEQ ID NO: 2487 - protein, 7 aa, synthetic construct
QIRGTEM

SEQ ID NO: 2488 - protein, 7 aa, synthetic construct
GMKDVRI

SEQ ID NO: 2489 - protein, 7 aa, synthetic construct
QTSSGTR

SEQ ID NO: 2490 - protein, 7 aa, synthetic construct
VGREEHM

SEQ ID NO: 2491 - protein, 7 aa, synthetic construct
AMRLSGG

SEQ ID NO: 2492 - protein, 7 aa, synthetic construct
MMKTEKG

SEQ ID NO: 2493 - protein, 7 aa, synthetic construct
AMRLSEA

SEQ ID NO: 2494 - protein, 7 aa, synthetic construct
DSTGIKL

SEQ ID NO: 2495 - protein, 7 aa, synthetic construct
QTSGDTR

SEQ ID NO: 2496 - protein, 7 aa, synthetic construct
RTSSDTR

SEQ ID NO: 2497 - protein, 7 aa, synthetic construct
VKIYGDL

SEQ ID NO: 2498 - protein, 7 aa, synthetic construct
TSSPPVV

SEQ ID NO: 2499 - protein, 7 aa, synthetic construct
GSMQTKN

SEQ ID NO: 2500 - protein, 7 aa, synthetic construct
QMSSDTR

SEQ ID NO: 2501 - protein, 7 aa, synthetic construct
AVRLSEG

SEQ ID NO: 2502 - protein, 7 aa, synthetic construct
GMQDVRN

SEQ ID NO: 2503 - protein, 7 aa, synthetic construct
TRSPPVV

SEQ ID NO: 2504 - protein, 7 aa, synthetic construct
KRNTSEK

SEQ ID NO: 2505 - protein, 7 aa, synthetic construct
GVDNADR

SEQ ID NO: 2506 - protein, 7 aa, synthetic construct
GMQDERI

SEQ ID NO: 2507 - protein, 7 aa, synthetic construct
QTSSDTR

SEQ ID NO: 2508 - protein, 7 aa, synthetic construct
QASSDTR

SEQ ID NO: 2509 - protein, 7 aa, synthetic construct
AMRLSEG

SEQ ID NO: 2510 - protein, 7 aa, synthetic construct
VKIYGAQ

SEQ ID NO: 2511 - protein, 7 aa, synthetic construct
AMGLSEG

SEQ ID NO: 2512 - protein, 7 aa, synthetic construct
GMQDVSI

SEQ ID NO: 2513 - protein, 7 aa, synthetic construct
AMRLSDG

SEQ ID NO: 2514 - protein, 7 aa, synthetic construct
DVKSDTQ

SEQ ID NO: 2515 - protein, 7 aa, synthetic construct
GSMQTQT

SEQ ID NO: 2516 - protein, 7 aa, synthetic construct
DKIYGAL

SEQ ID NO: 2517 - protein, 7 aa, synthetic construct
RSDVESD

SEQ ID NO: 2518 - protein, 7 aa, synthetic construct
GTGMAVK

SEQ ID NO: 2519 - protein, 7 aa, synthetic construct
VKIYGAL

SEQ ID NO: 2520 - protein, 7 aa, synthetic construct
QIKPIER

SEQ ID NO: 2521 - protein, 7 aa, synthetic construct
QTSSDTR

SEQ ID NO: 2522 - protein, 7 aa, synthetic construct
GEVNADR

SEQ ID NO: 2523 - protein, 7 aa, synthetic construct
QTSSDTS

SEQ ID NO: 2524 - protein, 7 aa, synthetic construct
AMRLSEG

SEQ ID NO: 2525 - protein, 7 aa, synthetic construct
GSKLATH

SEQ ID NO: 2526 - protein, 7 aa, synthetic construct
IGDMGGL

SEQ ID NO: 2527 - protein, 7 aa, synthetic construct
NGQGVTF

SEQ ID NO: 2528 - protein, 7 aa, synthetic construct
GKQDVRI

SEQ ID NO: 2529 - protein, 7 aa, synthetic construct
PTRGEKE

SEQ ID NO: 2530 - protein, 7 aa, synthetic construct
QTSSDTR

SEQ ID NO: 2531 - protein, 7 aa, synthetic construct
QTSSDTR

SEQ ID NO: 2532 - protein, 7 aa, synthetic construct
KAIDGIE

SEQ ID NO: 2533 - protein, 7 aa, synthetic construct
QTSSDAR

SEQ ID NO: 2534 - protein, 7 aa, synthetic construct
IRNTSEK

SEQ ID NO: 2535 - protein, 7 aa, synthetic construct
GSKLATP

SEQ ID NO: 2536 - protein, 7 aa, synthetic construct
GMQEVRI

SEQ ID NO: 2537 - protein, 7 aa, synthetic construct
NRDTSEK

SEQ ID NO: 2538 - protein, 7 aa, synthetic construct
QIRGTEM

SEQ ID NO: 2539 - protein, 7 aa, synthetic construct
ARTGIKL

SEQ ID NO: 2540 - protein, 7 aa, synthetic construct
QTSSDTW

SEQ ID NO: 2541 - protein, 7 aa, synthetic construct
RHEHSKD

SEQ ID NO: 2542 - protein, 7 aa, synthetic construct
AMRLSQG

SEQ ID NO: 2543 - protein, 7 aa, synthetic construct
RRDVVSD

SEQ ID NO: 2544 - protein, 7 aa, synthetic construct
NSYVVKS

SEQ ID NO: 2545 - protein, 7 aa, synthetic construct
AMRLCEG

SEQ ID NO: 2546 - protein, 7 aa, synthetic construct
YGQGVSF

SEQ ID NO: 2547 - protein, 7 aa, synthetic construct
ETATKSN

SEQ ID NO: 2548 - protein, 7 aa, synthetic construct
GVVNAER

SEQ ID NO: 2549 - protein, 7 aa, synthetic construct
IGAMGGL

SEQ ID NO: 2550 - protein, 7 aa, synthetic construct
NRSTSEK

SEQ ID NO: 2551 - protein, 7 aa, synthetic construct
AMRLSEG

SEQ ID NO: 2552 - protein, 7 aa, synthetic construct
QTSSDTR

SEQ ID NO: 2553 - protein, 7 aa, synthetic construct
QTSSVTR

SEQ ID NO: 2554 - protein, 7 aa, synthetic construct
QTSSDTS

SEQ ID NO: 2555 - protein, 7 aa, synthetic construct
PNNLHSY

SEQ ID NO: 2556 - protein, 7 aa, synthetic construct
PGLRGKV

SEQ ID NO: 2557 - protein, 7 aa, synthetic construct
ARNDTEG

SEQ ID NO: 2558 - protein, 7 aa, synthetic construct
QTSCDTR

SEQ ID NO: 2559 - protein, 7 aa, synthetic construct
VIQQGHV

SEQ ID NO: 2560 - protein, 7 aa, synthetic construct
PGLSGKV

SEQ ID NO: 2561 - protein, 7 aa, synthetic construct
QTSSDTR

SEQ ID NO: 2562 - protein, 7 aa, synthetic construct
GRHNEPP

SEQ ID NO: 2563 - protein, 7 aa, synthetic construct
QTSSHTR

SEQ ID NO: 2564 - protein, 7 aa, synthetic construct
AMHLSEG

SEQ ID NO: 2565 - protein, 7 aa, synthetic construct
MMKTETG

SEQ ID NO: 2566 - protein, 7 aa, synthetic construct
VYQQGHV

SEQ ID NO: 2567 - protein, 7 aa, synthetic construct
DFQQGHV

SEQ ID NO: 2568 - protein, 7 aa, synthetic construct
GSMQTQN

SEQ ID NO: 2569 - protein, 7 aa, synthetic construct
GNGMAVK

SEQ ID NO: 2570 - protein, 7 aa, synthetic construct
NGQGVSV

SEQ ID NO: 2571 - protein, 7 aa, synthetic construct
GESGRDQ

SEQ ID NO: 2572 - protein, 7 aa, synthetic construct
ARNVTEG

SEQ ID NO: 2573 - protein, 7 aa, synthetic construct
IGAKGGL

SEQ ID NO: 2574 - protein, 7 aa, synthetic construct
IGQGVRV

SEQ ID NO: 2575 - protein, 7 aa, synthetic construct
VKIYGAM

SEQ ID NO: 2576 - protein, 7 aa, synthetic construct
GRHNETH

SEQ ID NO: 2577 - protein, 7 aa, synthetic construct
EGSVRMD

SEQ ID NO: 2578 - protein, 7 aa, synthetic construct
GVVKADR

SEQ ID NO: 2579 - protein, 7 aa, synthetic construct
QTPSDTR

SEQ ID NO: 2580 - protein, 7 aa, synthetic construct
ALRLSEG

SEQ ID NO: 2581 - protein, 7 aa, synthetic construct
NRNASEK

SEQ ID NO: 2582 - protein, 7 aa, synthetic construct
IGAMGGQ

SEQ ID NO: 2583 - protein, 7 aa, synthetic construct
GCLTQTH

SEQ ID NO: 2584 - protein, 7 aa, synthetic construct
IGAMGGL

SEQ ID NO: 2585 - protein, 7 aa, synthetic construct
PTRGENE

SEQ ID NO: 2586 - protein, 7 aa, synthetic construct
QIRGNEM

SEQ ID NO: 2587 - protein, 7 aa, synthetic construct
GSLTQTQ

SEQ ID NO: 2588 - protein, 7 aa, synthetic construct
AMRLSEE

SEQ ID NO: 2589 - protein, 7 aa, synthetic construct
GSIQTQN

SEQ ID NO: 2590 - protein, 7 aa, synthetic construct
GTGMAVK

SEQ ID NO: 2591 - protein, 7 aa, synthetic construct
HTRGENE

SEQ ID NO: 2592 - protein, 7 aa, synthetic construct
GVVNADR

SEQ ID NO: 2593 - protein, 7 aa, synthetic construct
GYDLTGN

SEQ ID NO: 2594 - protein, 7 aa, synthetic construct
GSMQAQN

SEQ ID NO: 2595 - protein, 7 aa, synthetic construct
QTSSDTT

SEQ ID NO: 2596 - protein, 7 aa, synthetic construct
QTSSYTR

SEQ ID NO: 2597 - protein, 7 aa, synthetic construct
AMRLSDG

SEQ ID NO: 2598 - protein, 7 aa, synthetic construct
NRNTSER

SEQ ID NO: 2599 - protein, 7 aa, synthetic construct
SERRQED

SEQ ID NO: 2600 - protein, 7 aa, synthetic construct
IGQGVSF

SEQ ID NO: 2601 - protein, 7 aa, synthetic construct
GVVNADR

SEQ ID NO: 2602 - protein, 6 aa, synthetic construct
TSSDTR

SEQ ID NO: 2603 - protein, 7 aa, synthetic construct
GTDMAVK

SEQ ID NO: 2604 - protein, 7 aa, synthetic construct
GSLTQTH

SEQ ID NO: 2605 - protein, 7 aa, synthetic construct
GMRLSEG

SEQ ID NO: 2606 - protein, 7 aa, synthetic construct
NRNSSEK

SEQ ID NO: 2607 - protein, 7 aa, synthetic construct
VKIYGAL

SEQ ID NO: 2608 - protein, 7 aa, synthetic construct
MMKNETG

SEQ ID NO: 2609 - protein, 7 aa, synthetic construct
PTRGENE

SEQ ID NO: 2610 - protein, 7 aa, synthetic construct
VAREEHI

SEQ ID NO: 2611 - protein, 7 aa, synthetic construct
ATRLSEG

SEQ ID NO: 2612 - protein, 7 aa, synthetic construct
AMRLSEG

SEQ ID NO: 2613 - protein, 7 aa, synthetic construct
NGNTSEK

SEQ ID NO: 2614 - protein, 7 aa, synthetic construct
ERSGLGM

SEQ ID NO: 2615 - protein, 7 aa, synthetic construct
AMCLSEG

SEQ ID NO: 2616 - protein, 7 aa, synthetic construct
RNQNNRQ

SEQ ID NO: 2617 - protein, 7 aa, synthetic construct
QTSSDTM

SEQ ID NO: 2618 - protein, 7 aa, synthetic construct
VGSVRKD

SEQ ID NO: 2619 - protein, 7 aa, synthetic construct
AMRLTEG

SEQ ID NO: 2620 - protein, 7 aa, synthetic construct
AMRLGEG

SEQ ID NO: 2621 - protein, 7 aa, synthetic construct
HTSSDTR

SEQ ID NO: 2622 - protein, 7 aa, synthetic construct
ARRLSEG

SEQ ID NO: 2623 - protein, 7 aa, synthetic construct
ASTGNKL

SEQ ID NO: 2624 - protein, 7 aa, synthetic construct
QTKGGSS

SEQ ID NO: 2625 - protein, 7 aa, synthetic construct
IGAMGGL

SEQ ID NO: 2626 - protein, 7 aa, synthetic construct
VARQEHM

SEQ ID NO: 2627 - protein, 7 aa, synthetic construct
QIKPNER

SEQ ID NO: 2628 - protein, 7 aa, synthetic construct
MINRDTT

SEQ ID NO: 2629 - protein, 7 aa, synthetic construct
GIMRTKN

SEQ ID NO: 2630 - protein, 7 aa, synthetic construct
NRNTGEK

SEQ ID NO: 2631 - protein, 7 aa, synthetic construct
VFQQGNV

SEQ ID NO: 2632 - protein, 7 aa, synthetic construct
IGKGVSV

SEQ ID NO: 2633 - protein, 7 aa, synthetic construct
AMRLSVG

SEQ ID NO: 2634 - protein, 7 aa, synthetic construct
KSTPSKS

SEQ ID NO: 2635 - protein, 7 aa, synthetic construct
VKINGAL

SEQ ID NO: 2636 - protein, 7 aa, synthetic construct
GSLTQTN

SEQ ID NO: 2637 - protein, 7 aa, synthetic construct
NRTTSEK

SEQ ID NO: 2638 - protein, 7 aa, synthetic construct
TISNVTN

SEQ ID NO: 2639 - protein, 7 aa, synthetic construct
AIRLSEG

SEQ ID NO: 2640 - protein, 7 aa, synthetic construct
GIMRTQN

SEQ ID NO: 2641 - protein, 7 aa, synthetic construct
DRNTSEK

SEQ ID NO: 2642 - protein, 7 aa, synthetic construct
AMRLSEG

SEQ ID NO: 2643 - protein, 7 aa, synthetic construct
GSQTQTH

SEQ ID NO: 2644 - protein, 7 aa, synthetic construct
NTNTSEK

SEQ ID NO: 2645 - protein, 7 aa, synthetic construct
QNRGTEM

SEQ ID NO: 2646 - protein, 7 aa, synthetic construct
GTGMAVK

SEQ ID NO: 2647 - protein, 7 aa, synthetic construct
RHVNSKD

SEQ ID NO: 2648 - protein, 7 aa, synthetic construct
PDLSGKV

SEQ ID NO: 2649 - protein, 7 aa, synthetic construct
ASTGIKL

SEQ ID NO: 2650 - protein, 7 aa, synthetic construct
NRNTTEK

SEQ ID NO: 2651 - protein, 7 aa, synthetic construct
ASTGIKL

SEQ ID NO: 2652 - protein, 7 aa, synthetic construct
SGRNNRV

SEQ ID NO: 2653 - protein, 7 aa, synthetic construct
NSSPPVV

SEQ ID NO: 2654 - protein, 7 aa, synthetic construct
GSKLDTP

SEQ ID NO: 2655 - protein, 7 aa, synthetic construct
NSSVVKS

SEQ ID NO: 2656 - protein, 7 aa, synthetic construct
NRNTSVK

SEQ ID NO: 2657 - protein, 7 aa, synthetic construct
TISTSSS

SEQ ID NO: 2658 - protein, 7 aa, synthetic construct
GTGIAVK

SEQ ID NO: 2659 - protein, 7 aa, synthetic construct
ASNGIKL

SEQ ID NO: 2660 - protein, 7 aa, synthetic construct
VFQQGQV

SEQ ID NO: 2661 - protein, 7 aa, synthetic construct
ASMQTQN

SEQ ID NO: 2662 - protein, 7 aa, synthetic construct
GVSGRDQ

SEQ ID NO: 2663 - protein, 7 aa, synthetic construct
QTSSDTR

SEQ ID NO: 2664 - protein, 7 aa, synthetic construct
KINRATT

SEQ ID NO: 2665 - protein, 7 aa, synthetic construct
NRNTSEK

SEQ ID NO: 2666 - protein, 7 aa, synthetic construct
GVVNADR

SEQ ID NO: 2667 - protein, 7 aa, synthetic construct
RESRQED

SEQ ID NO: 2668 - protein, 7 aa, synthetic construct
PNNLHRS

SEQ ID NO: 2669 - protein, 6 aa, synthetic construct
AMRLSG

SEQ ID NO: 2670 - protein, 7 aa, synthetic construct
VSESSNR

SEQ ID NO: 2671 - protein, 7 aa, synthetic construct
QIKTIER

SEQ ID NO: 2672 - protein, 7 aa, synthetic construct
KDIDGIV

SEQ ID NO: 2673 - protein, 7 aa, synthetic construct
KVELNRV

SEQ ID NO: 2674 - protein, 7 aa, synthetic construct
RHVHRKD

SEQ ID NO: 2675 - protein, 7 aa, synthetic construct
TISHVTN

SEQ ID NO: 2676 - protein, 7 aa, synthetic construct
ETSSDTR

SEQ ID NO: 2677 - protein, 7 aa, synthetic construct
NRSVVKS

SEQ ID NO: 2678 - protein, 7 aa, synthetic construct
NRNTSKK

SEQ ID NO: 2679 - protein, 7 aa, synthetic construct
SRNTSEK

SEQ ID NO: 2680 - protein, 7 aa, synthetic construct
TSSPPLL

SEQ ID NO: 2681 - protein, 7 aa, synthetic construct
QTSSNTR

SEQ ID NO: 2682 - protein, 7 aa, synthetic construct
NRNTREK

SEQ ID NO: 2683 - protein, 7 aa, synthetic construct
NGQGVSF

SEQ ID NO: 2684 - protein, 7 aa, synthetic construct
GSMQTQS

SEQ ID NO: 2685 - protein, 7 aa, synthetic construct
IGQGVSV

SEQ ID NO: 2686 - protein, 7 aa, synthetic construct
VARDEHM

SEQ ID NO: 2687 - protein, 7 aa, synthetic construct
QIRGAEM

SEQ ID NO: 2688 - protein, 7 aa, synthetic construct
GRHNETP

SEQ ID NO: 2689 - protein, 7 aa, synthetic construct
YQGAESS

SEQ ID NO: 2690 - protein, 7 aa, synthetic construct
PGQSGKV

SEQ ID NO: 2691 - protein, 7 aa, synthetic construct
VAREGHM

SEQ ID NO: 2692 - protein, 7 aa, synthetic construct
RSMQTQN

SEQ ID NO: 2693 - protein, 7 aa, synthetic construct
GSLTKTH

SEQ ID NO: 2694 - protein, 7 aa, synthetic construct
PYDSTTS

SEQ ID NO: 2695 - protein, 7 aa, synthetic construct
AMRLSEG

SEQ ID NO: 2696 - protein, 7 aa, synthetic construct
HVVAVGE

SEQ ID NO: 2697 - protein, 7 aa, synthetic construct
GVVYADR

SEQ ID NO: 2698 - protein, 7 aa, synthetic construct
LVKDVRQ

SEQ ID NO: 2699 - protein, 7 aa, synthetic construct
AMRLSEG

SEQ ID NO: 2700 - protein, 7 aa, synthetic construct
QTSSDTK

SEQ ID NO: 2701 - protein, 7 aa, synthetic construct
HTSSDTR

SEQ ID NO: 2702 - protein, 7 aa, synthetic construct
AMLLSEG

SEQ ID NO: 2703 - protein, 7 aa, synthetic construct
VAREELM

SEQ ID NO: 2704 - protein, 7 aa, synthetic construct
TISHDTN

SEQ ID NO: 2705 - protein, 7 aa, synthetic construct
HVVAVGV

SEQ ID NO: 2706 - protein, 7 aa, synthetic construct
GCMQTQN

SEQ ID NO: 2707 - protein, 7 aa, synthetic construct
AMRLSEG

SEQ ID NO: 2708 - protein, 7 aa, synthetic construct
GSKLATT

SEQ ID NO: 2709 - protein, 7 aa, synthetic construct
VSDSGNR

SEQ ID NO: 2710 - protein, 7 aa, synthetic construct
VFQKGHV

SEQ ID NO: 2711 - protein, 7 aa, synthetic construct
AMRLREG

SEQ ID NO: 2712 - protein, 7 aa, synthetic construct
GMQDVRI

SEQ ID NO: 2713 - protein, 7 aa, synthetic construct
ETATKRI

SEQ ID NO: 2714 - protein, 7 aa, synthetic construct
AMRLSER

SEQ ID NO: 2715 - protein, 7 aa, synthetic construct
PGMSGKV

SEQ ID NO: 2716 - protein, 7 aa, synthetic construct
AMRLSKG

SEQ ID NO: 2717 - protein, 7 aa, synthetic construct
MMKTETW

SEQ ID NO: 2718 - protein, 7 aa, synthetic construct
VMRLSEG

SEQ ID NO: 2719 - protein, 7 aa, synthetic construct
GIMRNQN

SEQ ID NO: 2720 - protein, 7 aa, synthetic construct
NGQRVSF

SEQ ID NO: 2721 - protein, 7 aa, synthetic construct
GSKQATP

SEQ ID NO: 2722 - protein, 7 aa, synthetic construct
GSMQSQN

SEQ ID NO: 2723 - protein, 7 aa, synthetic construct
GMQDVRI

SEQ ID NO: 2724 - protein, 7 aa, synthetic construct
PKPETAL

SEQ ID NO: 2725 - protein, 7 aa, synthetic construct
ASTGIKL

SEQ ID NO: 2726 - protein, 7 aa, synthetic construct
NGQCVSF

SEQ ID NO: 2727 - protein, 6 aa, synthetic construct
VKDVSQ

SEQ ID NO: 2728 - protein, 7 aa, synthetic construct
PGLSGKV

SEQ ID NO: 2729 - protein, 7 aa, synthetic construct
LAREEHM

SEQ ID NO: 2730 - protein, 7 aa, synthetic construct
TIRHVTN

SEQ ID NO: 2731 - protein, 7 aa, synthetic construct
DEKSDTQ

SEQ ID NO: 2732 - protein, 7 aa, synthetic construct
GVVNGDR

SEQ ID NO: 2733 - protein, 7 aa, synthetic construct
RSEVVSD

SEQ ID NO: 2734 - protein, 7 aa, synthetic construct
MMKTETG

SEQ ID NO: 2735 - protein, 6 aa, synthetic construct
SRTESQ

SEQ ID NO: 2736 - protein, 7 aa, synthetic construct
PGLSGKV

SEQ ID NO: 2737 - protein, 7 aa, synthetic construct
GSMQTRN

SEQ ID NO: 2738 - protein, 7 aa, synthetic construct
GTIGNGF

SEQ ID NO: 2739 - protein, 7 aa, synthetic construct
RSDVVSA

SEQ ID NO: 2740 - protein, 7 aa, synthetic construct
PKRGENE

SEQ ID NO: 2741 - protein, 7 aa, synthetic construct
NRNTSGK

SEQ ID NO: 2742 - protein, 7 aa, synthetic construct
TIRPSSS

SEQ ID NO: 2743 - protein, 7 aa, synthetic construct
NGHGVSF

SEQ ID NO: 2744 - protein, 7 aa, synthetic construct
AMPLSEG

SEQ ID NO: 2745 - protein, 7 aa, synthetic construct
GSMQTQN

SEQ ID NO: 2746 - protein, 6 aa, synthetic construct
VKIGAL

SEQ ID NO: 2747 - protein, 7 aa, synthetic construct
VSDSSKR

SEQ ID NO: 2748 - protein, 7 aa, synthetic construct
QKKPIER

SEQ ID NO: 2749 - protein, 7 aa, synthetic construct
NGQGVSF

SEQ ID NO: 2750 - protein, 7 aa, synthetic construct
MINRATT

SEQ ID NO: 2751 - protein, 7 aa, synthetic construct
VGSERMD

SEQ ID NO: 2752 - protein, 7 aa, synthetic construct
GVTGRDQ

SEQ ID NO: 2753 - protein, 6 aa, synthetic construct
NNTSEK

SEQ ID NO: 2754 - protein, 7 aa, synthetic construct
RNKNNSQ

SEQ ID NO: 2755 - protein, 7 aa, synthetic construct
HEVAVGV

SEQ ID NO: 2756 - protein, 7 aa, synthetic construct
GSMRTQN

SEQ ID NO: 2757 - protein, 7 aa, synthetic construct
NRNTSQK

SEQ ID NO: 2758 - protein, 6 aa, synthetic construct
NRNTSE

SEQ ID NO: 2759 - protein, 7 aa, synthetic construct
ETATKSI

SEQ ID NO: 2760 - protein, 7 aa, synthetic construct
GVSGREQ

SEQ ID NO: 2761 - protein, 7 aa, synthetic construct
PGLSGKL

SEQ ID NO: 2762 - protein, 6 aa, synthetic construct
NRNTSK

SEQ ID NO: 2763 - protein, 7 aa, synthetic construct
LVKDESQ

SEQ ID NO: 2764 - protein, 7 aa, synthetic construct
YRNTSEK

SEQ ID NO: 2765 - protein, 7 aa, synthetic construct
VGRVRMD

SEQ ID NO: 2766 - protein, 7 aa, synthetic construct
GIKRTQN

SEQ ID NO: 2767 - protein, 7 aa, synthetic construct
QSSSDTR

SEQ ID NO: 2768 - protein, 7 aa, synthetic construct
NRNTSEE

SEQ ID NO: 2769 - protein, 7 aa, synthetic construct
GSKLATP

SEQ ID NO: 2770 - protein, 7 aa, synthetic construct
ADRTREG

SEQ ID NO: 2771 - protein, 7 aa, synthetic construct
GRHNENP

SEQ ID NO: 2772 - protein, 7 aa, synthetic construct
ETATKSI

SEQ ID NO: 2773 - protein, 7 aa, synthetic construct
HVVDVGV

SEQ ID NO: 2774 - protein, 7 aa, synthetic construct
LVKEVSQ

SEQ ID NO: 2775 - protein, 7 aa, synthetic construct
GSMQTQD

SEQ ID NO: 2776 - protein, 6 aa, synthetic construct
YQGAER

SEQ ID NO: 2777 - protein, 7 aa, synthetic construct
ETDTKSI

SEQ ID NO: 2778 - protein, 7 aa, synthetic construct
NSSDVKS

SEQ ID NO: 2779 - protein, 7 aa, synthetic construct
AMRLSEG

SEQ ID NO: 2780 - protein, 7 aa, synthetic construct
TSGPPVV

SEQ ID NO: 2781 - protein, 7 aa, synthetic construct
GVVNADQ

SEQ ID NO: 2782 - protein, 7 aa, synthetic construct
NRQGVSF

SEQ ID NO: 2783 - protein, 7 aa, synthetic construct
NSSVVKS

SEQ ID NO: 2784 - protein, 7 aa, synthetic construct
TISPSSS

SEQ ID NO: 2785 - protein, 7 aa, synthetic construct
VAREEHI

SEQ ID NO: 2786 - protein, 7 aa, synthetic construct
PTRGENQ

SEQ ID NO: 2787 - protein, 7 aa, synthetic construct
QTTGGSG

SEQ ID NO: 2788 - protein, 7 aa, synthetic construct
ALRLSEG

SEQ ID NO: 2789 - protein, 7 aa, synthetic construct
RNQNNSK

SEQ ID NO: 2790 - protein, 7 aa, synthetic construct
VSDSSNR

SEQ ID NO: 2791 - protein, 7 aa, synthetic construct
AGSESAK

SEQ ID NO: 2792 - protein, 7 aa, synthetic construct
TSSPPVV

SEQ ID NO: 2793 - protein, 7 aa, synthetic construct
RGRNNSV

SEQ ID NO: 2794 - protein, 7 aa, synthetic construct
QTSIDTR

SEQ ID NO: 2795 - protein, 7 aa, synthetic construct
NSSVVKY

SEQ ID NO: 2796 - protein, 7 aa, synthetic construct
DHAPGTH

SEQ ID NO: 2797 - protein, 7 aa, synthetic construct
NGLGVSF

SEQ ID NO: 2798 - protein, 7 aa, synthetic construct
YQGAESR

SEQ ID NO: 2799 - protein, 7 aa, synthetic construct
VALEEHM

SEQ ID NO: 2800 - protein, 7 aa, synthetic construct
QNNLHSS

SEQ ID NO: 2801 - protein, 7 aa, synthetic construct
VKIYGAL

SEQ ID NO: 2802 - protein, 7 aa, synthetic construct
VAHEEHM

SEQ ID NO: 2803 - protein, 6 aa, synthetic construct
PDSPTS

SEQ ID NO: 2804 - protein, 7 aa, synthetic construct
YKGAESR

SEQ ID NO: 2805 - protein, 7 aa, synthetic construct
HYNHPTS

SEQ ID NO: 2806 - protein, 7 aa, synthetic construct
VAREDHM

SEQ ID NO: 2807 - protein, 7 aa, synthetic construct
IGRIENE

SEQ ID NO: 2808 - protein, 7 aa, synthetic construct
GVSGRDQ

SEQ ID NO: 2809 - protein, 7 aa, synthetic construct
VAREEHI

SEQ ID NO: 2810 - protein, 7 aa, synthetic construct
PTRGENE

SEQ ID NO: 2811 - protein, 7 aa, synthetic construct
GYGDNKH

SEQ ID NO: 2812 - protein, 7 aa, synthetic construct
VSDSSDR

SEQ ID NO: 2813 - protein, 7 aa, synthetic construct
AMRLSEG

SEQ ID NO: 2814 - protein, 7 aa, synthetic construct
VSMQTQN

SEQ ID NO: 2815 - protein, 7 aa, synthetic construct
SESRQEE

SEQ ID NO: 2816 - protein, 7 aa, synthetic construct
GSMHTQN

SEQ ID NO: 2817 - protein, 7 aa, synthetic construct
KGAMGGL

SEQ ID NO: 2818 - protein, 7 aa, synthetic construct
GSIQTQN

SEQ ID NO: 2819 - protein, 7 aa, synthetic construct
ARNVTEG

SEQ ID NO: 2820 - protein, 7 aa, synthetic construct
PNQQQSQ

SEQ ID NO: 2821 - protein, 7 aa, synthetic construct
AMRPSEG

SEQ ID NO: 2822 - protein, 7 aa, synthetic construct
QTSNDTR

SEQ ID NO: 2823 - protein, 7 aa, synthetic construct
GSLTQTH

SEQ ID NO: 2824 - protein, 7 aa, synthetic construct
ETAKKSI

SEQ ID NO: 2825 - protein, 7 aa, synthetic construct
KAIDGIV

SEQ ID NO: 2826 - protein, 7 aa, synthetic construct
PYNHTTS

SEQ ID NO: 2827 - protein, 7 aa, synthetic construct
AMRLVRG

SEQ ID NO: 2828 - protein, 7 aa, synthetic construct
NRNTSDK

SEQ ID NO: 2829 - protein, 7 aa, synthetic construct
PKSETEL

SEQ ID NO: 2830 - protein, 7 aa, synthetic construct
GVSGRDQ

SEQ ID NO: 2831 - protein, 7 aa, synthetic construct
QRSSDTR

SEQ ID NO: 2832 - protein, 7 aa, synthetic construct
HVVAEGV

SEQ ID NO: 2833 - protein, 7 aa, synthetic construct
NRYTSEK

SEQ ID NO: 2834 - protein, 7 aa, synthetic construct
NGQGVSF

SEQ ID NO: 2835 - protein, 7 aa, synthetic construct
TSSPPVL

SEQ ID NO: 2836 - protein, 7 aa, synthetic construct
QTSSDTR

SEQ ID NO: 2837 - protein, 7 aa, synthetic construct
VSDSSNR

SEQ ID NO: 2838 - protein, 7 aa, synthetic construct
DVKRDTQ

SEQ ID NO: 2839 - protein, 7 aa, synthetic construct
GVVNADR

SEQ ID NO: 2840 - protein, 7 aa, synthetic construct
VAREERM

SEQ ID NO: 2841 - protein, 7 aa, synthetic construct
NGQAVSF

SEQ ID NO: 2842 - protein, 7 aa, synthetic construct
AMRLSEG

SEQ ID NO: 2843 - protein, 7 aa, synthetic construct
VARDEHM

SEQ ID NO: 2844 - protein, 7 aa, synthetic construct
VAREQHM

SEQ ID NO: 2845 - protein, 7 aa, synthetic construct
NRNTSEK

SEQ ID NO: 2846 - protein, 7 aa, synthetic construct
MIKTETG

SEQ ID NO: 2847 - protein, 7 aa, synthetic construct
GAGMAVK

SEQ ID NO: 2848 - protein, 7 aa, synthetic construct
GTGMAVR

SEQ ID NO: 2849 - protein, 7 aa, synthetic construct
PYDSPKS

SEQ ID NO: 2850 - protein, 7 aa, synthetic construct
NINTSEK

SEQ ID NO: 2851 - protein, 7 aa, synthetic construct
GVVIADR

SEQ ID NO: 2852 - protein, 7 aa, synthetic construct
NAQGVSF

SEQ ID NO: 2853 - protein, 7 aa, synthetic construct
GSMQTQN

SEQ ID NO: 2854 - protein, 7 aa, synthetic construct
AMRLREG

SEQ ID NO: 2855 - protein, 7 aa, synthetic construct
QTTRGSS

SEQ ID NO: 2856 - protein, 7 aa, synthetic construct
VSDSSIR

SEQ ID NO: 2857 - protein, 7 aa, synthetic construct
HVEAVGV

SEQ ID NO: 2858 - protein, 7 aa, synthetic construct
HYDSPTS

SEQ ID NO: 2859 - protein, 7 aa, synthetic construct
MMKTEAG

SEQ ID NO: 2860 - protein, 7 aa, synthetic construct
GTGMVVK

SEQ ID NO: 2861 - protein, 7 aa, synthetic construct
ADRTRDG

SEQ ID NO: 2862 - protein, 7 aa, synthetic construct
LVKDVSK

SEQ ID NO: 2863 - protein, 7 aa, synthetic construct
NGQVVSF

SEQ ID NO: 2864 - protein, 7 aa, synthetic construct
TISPSSR

SEQ ID NO: 2865 - protein, 7 aa, synthetic construct
PNNLHST

SEQ ID NO: 2866 - protein, 7 aa, synthetic construct
ASSPPVV

SEQ ID NO: 2867 - protein, 7 aa, synthetic construct
TISPRSS

SEQ ID NO: 2868 - protein, 7 aa, synthetic construct
PKPETAL

SEQ ID NO: 2869 - protein, 7 aa, synthetic construct
VAREEHM

SEQ ID NO: 2870 - protein, 7 aa, synthetic construct
VAREVHM

SEQ ID NO: 2871 - protein, 7 aa, synthetic construct
MMRTETG

SEQ ID NO: 2872 - protein, 7 aa, synthetic construct
GSLTQNH

SEQ ID NO: 2873 - protein, 7 aa, synthetic construct
PNLQQRQ

SEQ ID NO: 2874 - protein, 7 aa, synthetic construct
QTFSDTR

SEQ ID NO: 2875 - protein, 7 aa, synthetic construct
GRLTQTH

SEQ ID NO: 2876 - protein, 7 aa, synthetic construct
PKSETVM

SEQ ID NO: 2877 - protein, 7 aa, synthetic construct
VACEEHM

SEQ ID NO: 2878 - protein, 7 aa, synthetic construct
GVVNADR

SEQ ID NO: 2879 - protein, 7 aa, synthetic construct
VSDSSNG

SEQ ID NO: 2880 - protein, 7 aa, synthetic construct
PNNHHSS

SEQ ID NO: 2881 - protein, 7 aa, synthetic construct
AIRLSEG

SEQ ID NO: 2882 - protein, 7 aa, synthetic construct
MMKTEPG

SEQ ID NO: 2883 - protein, 7 aa, synthetic construct
QTSSETR

SEQ ID NO: 2884 - protein, 7 aa, synthetic construct
LTSSDTR

SEQ ID NO: 2885 - protein, 7 aa, synthetic construct
QTTGESS

SEQ ID NO: 2886 - protein, 7 aa, synthetic construct
TSSPPLV

SEQ ID NO: 2887 - protein, 7 aa, synthetic construct
QKTGGSS

SEQ ID NO: 2888 - protein, 7 aa, synthetic construct
GTSMAVK

SEQ ID NO: 2889 - protein, 7 aa, synthetic construct
PNNLNSS

SEQ ID NO: 2890 - protein, 7 aa, synthetic construct
PYDSPTR

SEQ ID NO: 2891 - protein, 7 aa, synthetic construct
TIRQENM

SEQ ID NO: 2892 - protein, 7 aa, synthetic construct
GTGVAVK

SEQ ID NO: 2893 - protein, 7 aa, synthetic construct
QIKPIER

SEQ ID NO: 2894 - protein, 7 aa, synthetic construct
TISHVTN

SEQ ID NO: 2895 - protein, 7 aa, synthetic construct
GYGDNQQ

SEQ ID NO: 2896 - protein, 7 aa, synthetic construct
GRHNETT

SEQ ID NO: 2897 - protein, 7 aa, synthetic construct
PMRLSEG

SEQ ID NO: 2898 - protein, 7 aa, synthetic construct
TNSPSSS

SEQ ID NO: 2899 - protein, 7 aa, synthetic construct
VSDSSNR

SEQ ID NO: 2900 - protein, 7 aa, synthetic construct
VAREEHM

SEQ ID NO: 2901 - protein, 7 aa, synthetic construct
TISPSRS

SEQ ID NO: 2902 - protein, 7 aa, synthetic construct
PKPETAQ

SEQ ID NO: 2903 - protein, 7 aa, synthetic construct
PNDSPTS

SEQ ID NO: 2904 - protein, 7 aa, synthetic construct
VGDSSNR

SEQ ID NO: 2905 - protein, 7 aa, synthetic construct
VSDSSNS

SEQ ID NO: 2906 - protein, 7 aa, synthetic construct
VSDGSNR

SEQ ID NO: 2907 - protein, 7 aa, synthetic construct
LDKDVSQ

SEQ ID NO: 2908 - protein, 7 aa, synthetic construct
PTRGENK

SEQ ID NO: 2909 - protein, 7 aa, synthetic construct
QTCSDTR

SEQ ID NO: 2910 - protein, 7 aa, synthetic construct
TISHVTN

SEQ ID NO: 2911 - protein, 7 aa, synthetic construct
SMRLSEG

SEQ ID NO: 2912 - protein, 7 aa, synthetic construct
KAIDGIV

SEQ ID NO: 2913 - protein, 7 aa, synthetic construct
KAIDGIV

SEQ ID NO: 2914 - protein, 7 aa, synthetic construct
VSREEHM

SEQ ID NO: 2915 - protein, 7 aa, synthetic construct
RSDVVSD

SEQ ID NO: 2916 - protein, 7 aa, synthetic construct
ASAGIKL

SEQ ID NO: 2917 - protein, 7 aa, synthetic construct
HVVAVGV

SEQ ID NO: 2918 - protein, 6 aa, synthetic construct
VAREHM

SEQ ID NO: 2919 - protein, 7 aa, synthetic construct
MINSATT

SEQ ID NO: 2920 - protein, 7 aa, synthetic construct
IGVGTKT

SEQ ID NO: 2921 - protein, 7 aa, synthetic construct
QTSSDIR

SEQ ID NO: 2922 - protein, 7 aa, synthetic construct
GVYGRDQ

SEQ ID NO: 2923 - protein, 7 aa, synthetic construct
GSVQTQN

SEQ ID NO: 2924 - protein, 7 aa, synthetic construct
QIRGSEM

SEQ ID NO: 2925 - protein, 7 aa, synthetic construct
TNSHVTN

SEQ ID NO: 2926 - protein, 7 aa, synthetic construct
YQGAETR

SEQ ID NO: 2927 - protein, 7 aa, synthetic construct
VFQQGHV

SEQ ID NO: 2928 - protein, 7 aa, synthetic construct
GSMQTQN

SEQ ID NO: 2929 - protein, 7 aa, synthetic construct
VAGEEHM

SEQ ID NO: 2930 - protein, 7 aa, synthetic construct
MMKTETR

SEQ ID NO: 2931 - protein, 7 aa, synthetic construct
MMKSETG

SEQ ID NO: 2932 - protein, 7 aa, synthetic construct
TSSPPVV

SEQ ID NO: 2933 - protein, 7 aa, synthetic construct
QTTGGSS

SEQ ID NO: 2934 - protein, 7 aa, synthetic construct
GVSGRDK

SEQ ID NO: 2935 - protein, 7 aa, synthetic construct
VSDSSYR

SEQ ID NO: 2936 - protein, 7 aa, synthetic construct
LMKTETG

SEQ ID NO: 2937 - protein, 7 aa, synthetic construct
KAIDGNV

SEQ ID NO: 2938 - protein, 7 aa, synthetic construct
AIRLSEG

SEQ ID NO: 2939 - protein, 7 aa, synthetic construct
NSSVVKT

SEQ ID NO: 2940 - protein, 7 aa, synthetic construct
NGQGVPF

SEQ ID NO: 2941 - protein, 7 aa, synthetic construct
RQVHSKD

SEQ ID NO: 2942 - protein, 7 aa, synthetic construct
VSNSSNR

SEQ ID NO: 2943 - protein, 7 aa, synthetic construct
RKQNNSQ

SEQ ID NO: 2944 - protein, 7 aa, synthetic construct
PGLSGNV

SEQ ID NO: 2945 - protein, 7 aa, synthetic construct
KIRGTEM

SEQ ID NO: 2946 - protein, 7 aa, synthetic construct
SGRNNSV

SEQ ID NO: 2947 - protein, 7 aa, synthetic construct
PYNHHTS

SEQ ID NO: 2948 - protein, 7 aa, synthetic construct
QTTAGSS

SEQ ID NO: 2949 - protein, 7 aa, synthetic construct
NRNTIEK

SEQ ID NO: 2950 - protein, 7 aa, synthetic construct
KTIGNGF

SEQ ID NO: 2951 - protein, 7 aa, synthetic construct
YQGAESR

SEQ ID NO: 2952 - protein, 7 aa, synthetic construct
GVVDADR

SEQ ID NO: 2953 - protein, 7 aa, synthetic construct
VDKSLVR

SEQ ID NO: 2954 - protein, 7 aa, synthetic construct
AMRLIEG

SEQ ID NO: 2955 - protein, 7 aa, synthetic construct
MMKTGTG

SEQ ID NO: 2956 - protein, 7 aa, synthetic construct
NGQGLSF

SEQ ID NO: 2957 - protein, 7 aa, synthetic construct
VARVEHM

SEQ ID NO: 2958 - protein, 7 aa, synthetic construct
QTSSDTG

SEQ ID NO: 2959 - protein, 7 aa, synthetic construct
IGEGTKS

SEQ ID NO: 2960 - protein, 7 aa, synthetic construct
NGRGVSF

SEQ ID NO: 2961 - protein, 7 aa, synthetic construct
VARGEHM

SEQ ID NO: 2962 - protein, 7 aa, synthetic construct
TGSPPVV

SEQ ID NO: 2963 - protein, 7 aa, synthetic construct
NRITSEK

SEQ ID NO: 2964 - protein, 7 aa, synthetic construct
RSDVVSE

SEQ ID NO: 2965 - protein, 7 aa, synthetic construct
PYDRPTS

SEQ ID NO: 2966 - protein, 7 aa, synthetic construct
MMKTETG

SEQ ID NO: 2967 - protein, 7 aa, synthetic construct
VAREEHM

SEQ ID NO: 2968 - protein, 7 aa, synthetic construct
VAREEHT

SEQ ID NO: 2969 - protein, 7 aa, synthetic construct
GTGMAVK

SEQ ID NO: 2970 - protein, 7 aa, synthetic construct
GRHKETP

SEQ ID NO: 2971 - protein, 7 aa, synthetic construct
QINRSNG

SEQ ID NO: 2972 - protein, 7 aa, synthetic construct
PYDSPTS

SEQ ID NO: 2973 - protein, 6 aa, synthetic construct
PKSETV

SEQ ID NO: 2974 - protein, 7 aa, synthetic construct
KTTGGSS

SEQ ID NO: 2975 - protein, 7 aa, synthetic construct
MVKDVSQ

SEQ ID NO: 2976 - protein, 7 aa, synthetic construct
TISHVTN

SEQ ID NO: 2977 - protein, 7 aa, synthetic construct
LVKDVSQ

SEQ ID NO: 2978 - protein, 7 aa, synthetic construct
ARKVTEG

SEQ ID NO: 2979 - protein, 7 aa, synthetic construct
GSKLAPP

SEQ ID NO: 2980 - protein, 7 aa, synthetic construct
MMMTETG

SEQ ID NO: 2981 - protein, 7 aa, synthetic construct
VAPEEHM

SEQ ID NO: 2982 - protein, 7 aa, synthetic construct
NRNTSEK

SEQ ID NO: 2983 - protein, 7 aa, synthetic construct
NRNPSEK

SEQ ID NO: 2984 - protein, 7 aa, synthetic construct
ASTGIKM

SEQ ID NO: 2985 - protein, 7 aa, synthetic construct
IGQGVIV

SEQ ID NO: 2986 - protein, 7 aa, synthetic construct
GSMLTQN

SEQ ID NO: 2987 - protein, 7 aa, synthetic construct
TSSPPVL

SEQ ID NO: 2988 - protein, 7 aa, synthetic construct
GTIGNGI

SEQ ID NO: 2989 - protein, 7 aa, synthetic construct
GSMQTQN

SEQ ID NO: 2990 - protein, 7 aa, synthetic construct
IWQGVSV

SEQ ID NO: 2991 - protein, 7 aa, synthetic construct
QTSSDTR

SEQ ID NO: 2992 - protein, 7 aa, synthetic construct
GYENNKH

SEQ ID NO: 2993 - protein, 7 aa, synthetic construct
VSGSSNR

SEQ ID NO: 2994 - protein, 7 aa, synthetic construct
GSLQTQN

SEQ ID NO: 2995 - protein, 7 aa, synthetic construct
IAQGVSV

SEQ ID NO: 2996 - protein, 7 aa, synthetic construct
ARNVKEG

SEQ ID NO: 2997 - protein, 7 aa, synthetic construct
IGVGTKS

SEQ ID NO: 2998 - protein, 7 aa, synthetic construct
YQGDESR

SEQ ID NO: 2999 - protein, 7 aa, synthetic construct
VSASSNR

SEQ ID NO: 3000 - protein, 7 aa, synthetic construct
QTSRDTR

SEQ ID NO: 3001 - RNA, 21 nt, synthetic construct
  source 1..21: mol_type = other RNA
caaataaaaccgatcgaacgg

SEQ ID NO: 3002 - RNA, 21 nt, synthetic construct
  source 1..21: mol_type = other RNA
atcgggcaaggagtgagcgtg

SEQ ID NO: 3003 - RNA, 21 nt, synthetic construct
  source 1..21: mol_type = other RNA
ccgaataatcttcatagttct

SEQ ID NO: 3004 - RNA, 21 nt, synthetic construct
  source 1..21: mol_type = other RNA
cagacgtctagtgatactagg

SEQ ID NO: 3005 - RNA, 21 nt, synthetic construct
  source 1..21: mol_type = other RNA
gtcaaaatatacggcgccctc

SEQ ID NO: 3006 - RNA, 21 nt, synthetic construct
  source 1..21: mol_type = other RNA
ggcaccggcatggccgtgaag

SEQ ID NO: 3007 - RNA, 21 nt, synthetic construct
  source 1..21: mol_type = other RNA
cagatcagaggcaccgagatg

SEQ ID NO: 3008 - RNA, 21 nt, synthetic construct
  source 1..21: mol_type = other RNA
aacagaaacaccagcgagaag

SEQ ID NO: 3009 - RNA, 21 nt, synthetic construct
  source 1..21: mol_type = other RNA
gcgatgcgtcttagtgagggg

SEQ ID NO: 3010 - RNA, 21 nt, synthetic construct
  source 1..21: mol_type = other RNA
ttggtcaaagacgtaagccaa

SEQ ID NO: 3011 - RNA, 21 nt, synthetic construct
  source 1..21: mol_type = other RNA
gtgagcgacagcagcaacaga

SEQ ID NO: 3012 - RNA, 21 nt, synthetic construct
  source 1..21: mol_type = other RNA
accatcaaccccagcagcagc

SEQ ID NO: 3013 - RNA, 21 nt, synthetic construct
  source 1..21: mol_type = other RNA
gttgctcgtgaggagcatatg

SEQ ID NO: 3014 - RNA, 21 nt, synthetic construct
  source 1..21: mol_type = other RNA
ggggtggttaatgctgatcgg

SEQ ID NO: 3015 - RNA, 21 nt, synthetic construct
  source 1..21: mol_type = other RNA
accagcagcccccccgtggtg

SEQ ID NO: 3016 - RNA, 21 nt, synthetic construct
  source 1..21: mol_type = other RNA
agaagcgacgtggtgagcgac

SEQ ID NO: 3017 - RNA, 21 nt, synthetic construct
  source 1..21: mol_type = other RNA
cctacgcggggtgagaatgag

SEQ ID NO: 3018 - RNA, 21 nt, synthetic construct
  source 1..21: mol_type = other RNA
agcggcagaaacaacagcgtg

SEQ ID NO: 3019 - RNA, 21 nt, synthetic construct
  source 1..21: mol_type = other RNA
agaaaccagaacaacagccag

SEQ ID NO: 3020 - RNA, 21 nt, synthetic construct
  source 1..21: mol_type = other RNA
gtcttccaacaaggacacgtt

SEQ ID NO: 3021 - RNA, 21 nt, synthetic construct
  source 1..21: mol_type = other RNA
aatggtcagggtgtttctttt

SEQ ID NO: 3022 - RNA, 21 nt, synthetic construct
  source 1..21: mol_type = other RNA
accatcagccccagcagcagc

SEQ ID NO: 3023 - RNA, 21 nt, synthetic construct
  source 1..21: mol_type = other RNA
cctaagtcggagactgtgttg

SEQ ID NO: 3024 - RNA, 21 nt, synthetic construct
  source 1..21: mol_type = other RNA
atgatgaagactgagacgggg

SEQ ID NO: 3025 - RNA, 21 nt, synthetic construct
  source 1..21: mol_type = other RNA
accatcagacaggtgaacatg

SEQ ID NO: 3026 - RNA, 21 nt, synthetic construct
  source 1..21: mol_type = other RNA
ataggggccatgggcggtctg

SEQ ID NO: 3027 - RNA, 21 nt, synthetic construct
  source 1..21: mol_type = other RNA
agagagaagactgaggggctg

SEQ ID NO: 3028 - RNA, 21 nt, synthetic construct
  source 1..21: mol_type = other RNA
gcggatcggactagggatggg

SEQ ID NO: 3029 - RNA, 21 nt, synthetic construct
  source 1..21: mol_type = other RNA
ggcatgcaagacgtacgcatc

SEQ ID NO: 3030 - RNA, 21 nt, synthetic construct
  source 1..21: mol_type = other RNA
cctacgcggggtgagaatatg

SEQ ID NO: 3031 - DNA, 21 bp, synthetic construct
  source 1..21: mol_type = other DNA
tgccaaggagccgaaagtcgc

SEQ ID NO: 3032 - RNA, 21 nt, synthetic construct
  source 1..21: mol_type = other RNA
caaacaacggggggatccagt

SEQ ID NO: 3033 - DNA, 21 bp, synthetic construct
  source 1..21: mol_type = other DNA
gtgggcagcgtgagaatggac

SEQ ID NO: 3034 - RNA, 21 nt, synthetic construct
  source 1..21: mol_type = other RNA
atgattaatcgtgctactact

SEQ ID NO: 3035 - RNA, 21 nt, synthetic construct
  source 1..21: mol_type = other RNA
gggagtctgactcagactcat

SEQ ID NO: 3036 - RNA, 21 nt, synthetic construct
  source 1..21: mol_type = other RNA
ggctccatgcaaacacaaaac

SEQ ID NO: 3037 - RNA, 21 nt, synthetic construct
  source 1..21: mol_type = other RNA
gccagcaccggcatcaagctg

SEQ ID NO: 3038 - RNA, 21 nt, synthetic construct
  source 1..21: mol_type = other RNA
ggtgtgtctggtagggatcag

SEQ ID NO: 3039 - RNA, 21 nt, synthetic construct
  source 1..21: mol_type = other RNA
cccggcctgagcggcaaggtg

SEQ ID NO: 3040 - DNA, 21 bp, synthetic construct
  source 1..21: mol_type = other DNA
gtcaaaatatacggcgccctg

SEQ ID NO: 3041 - RNA, 21 nt, synthetic construct
  source 1..21: mol_type = other RNA
agcgagagcagacaggaggac

SEQ ID NO: 3042 - RNA, 21 nt, synthetic construct
  source 1..21: mol_type = other RNA
agacacgtgcacagcaaggac

SEQ ID NO: 3043 - RNA, 21 nt, synthetic construct
  source 1..21: mol_type = other RNA
accatcagccacgtcaccaac

SEQ ID NO: 3044 - RNA, 21 nt, synthetic construct
  source 1..21: mol_type = other RNA
ggcagacacaacgagaccccc

SEQ ID NO: 3045 - RNA, 21 nt, synthetic construct
  source 1..21: mol_type = other RNA
cacgtggtggccgtgggcgtg

SEQ ID NO: 3046 - RNA, 21 nt, synthetic construct
  source 1..21: mol_type = other RNA
attggggtgggtacgaagtcg

SEQ ID NO: 3047 - RNA, 21 nt, synthetic construct
  source 1..21: mol_type = other RNA
gagactgctacgaagagtatt

SEQ ID NO: 3048 - RNA, 21 nt, synthetic construct
  source 1..21: mol_type = other RNA
cccaacctgcagcagagccag

SEQ ID NO: 3049 - RNA, 21 nt, synthetic construct
  source 1..21: mol_type = other RNA
gggtatggggataatcagcat

SEQ ID NO: 3050 - RNA, 21 nt, synthetic construct
  source 1..21: mol_type = other RNA
tatcagggggctgagtcgcgt

SEQ ID NO: 3051 - RNA, 21 nt, synthetic construct
  source 1..21: mol_type = other RNA
ccttatgatagtcctacgagt

SEQ ID NO: 3052 - RNA, 21 nt, synthetic construct
  source 1..21: mol_type = other RNA
ggcagcaagctggccaccccc

SEQ ID NO: 3053 - RNA, 21 nt, synthetic construct
  source 1..21: mol_type = other RNA
aaagccatcgacggcatcgtg

SEQ ID NO: 3054 - RNA, 21 nt, synthetic construct
  source 1..21: mol_type = other RNA
gcccggaacgttacagaaggg

SEQ ID NO: 3055 - RNA, 21 nt, synthetic construct
  source 1..21: mol_type = other RNA
aacagttccgttgtcaaatct

SEQ ID NO: 3056 - RNA, 21 nt, synthetic construct
  source 1..21: mol_type = other RNA
atcggcagaatcgtgaacgag

SEQ ID NO: 3057 - RNA, 21 nt, synthetic construct
  source 1..21: mol_type = other RNA
ggcataatgagaacccaaaac

SEQ ID NO: 3058 - RNA, 21 nt, synthetic construct
  source 1..21: mol_type = other RNA
gacgtgaagagcgacacccag

SEQ ID NO: 3059 - RNA, 21 nt, synthetic construct
  source 1..21: mol_type = other RNA
gataatatgactaagcatgtg

SEQ ID NO: 3060 - RNA, 21 nt, synthetic construct
  source 1..21: mol_type = other RNA
aaggtggagttcaacagagtg

SEQ ID NO: 3061 - RNA, 21 nt, synthetic construct
  source 1..21: mol_type = other RNA
atgacgatcggtaacggcttc

SEQ ID NO: 3062 - RNA, 21 nt, synthetic construct
  source 1..21: mol_type = other RNA
gttcatgcgccgggtacgcat

SEQ ID NO: 3063 - RNA, 21 nt, synthetic construct
  source 1..21: mol_type = other RNA
ggcaccatcggcaacggcttc

SEQ ID NO: 3064 - RNA, 21 nt, synthetic construct
  source 1..21: mol_type = other RNA
ccctacaaccaccccaccagc

SEQ ID NO: 3065 - RNA, 21 nt, synthetic construct
  source 1..21: mol_type = other RNA
cccaagcccgagaccgccctg

SEQ ID NO: 3066 - RNA, 21 nt, synthetic construct
  source 1..21: mol_type = other RNA
ggatacgaaaacaaccaacac

SEQ ID NO: 3067 - RNA, 21 nt, synthetic construct
  source 1..21: mol_type = other RNA
cctacgcggggtgagaatctg

SEQ ID NO: 3068 - RNA, 21 nt, synthetic construct
  source 1..21: mol_type = other RNA
gccacacggctcagcgaagta

SEQ ID NO: 3069 - RNA, 21 nt, synthetic construct
  source 1..21: mol_type = other RNA
gagagaagcggcctgggcatg

SEQ ID NO: 3070 - RNA, 21 nt, synthetic construct
  source 1..21: mol_type = other RNA
ataatgaacggcatggttctg

SEQ ID NO: 3071 - RNA, 21 nt, synthetic construct
  source 1..21: mol_type = other RNA
gcaggctcagaatcagcaata

SEQ ID NO: 3072 - RNA, 21 nt, synthetic construct
  source 1..21: mol_type = other RNA
ccaaccagaggcgaaaacgaa

SEQ ID NO: 3073 - RNA, 21 nt, synthetic construct
  source 1..21: mol_type = other RNA
ggcggactgcccatagcttca

SEQ ID NO: 3074 - RNA, 21 nt, synthetic construct
  source 1..21: mol_type = other RNA
gaaagagacgggaacaacttg

SEQ ID NO: 3075 - RNA, 21 nt, synthetic construct
  source 1..21: mol_type = other RNA
agcctggtgcagaacgccgac

SEQ ID NO: 3076 - RNA, 21 nt, synthetic construct
  source 1..21: mol_type = other RNA
accggcttggcagtacactca

SEQ ID NO: 3077 - RNA, 21 nt, synthetic construct
  source 1..21: mol_type = other RNA
gcggctactgggattaagttg

SEQ ID NO: 3078 - RNA, 21 nt, synthetic construct
  source 1..21: mol_type = other RNA
agtaggacggagagttcgcag

SEQ ID NO: 3079 - RNA, 21 nt, synthetic construct
  source 1..21: mol_type = other RNA
agcgtgaccggcggccagctg

SEQ ID NO: 3080 - RNA, 21 nt, synthetic construct
  source 1..21: mol_type = other RNA
cccagcagaggcgagaacgtg

SEQ ID NO: 3081 - RNA, 21 nt, synthetic construct
  source 1..21: mol_type = other RNA
tctggtcagtcggggaaggtg

SEQ ID NO: 3082 - RNA, 21 nt, synthetic construct
  source 1..21: mol_type = other RNA
agaaacgcccccaacatggac

SEQ ID NO: 3083 - RNA, 21 nt, synthetic construct
  source 1..21: mol_type = other RNA
gtgctgggcgcccacagcgtg

SEQ ID NO: 3084 - RNA, 21 nt, synthetic construct
  source 1..21: mol_type = other RNA
ggtggggttagtgaggggcgt

SEQ ID NO: 3085 - RNA, 21 nt, synthetic construct
  source 1..21: mol_type = other RNA
tcctcggccatgggcggactg

SEQ ID NO: 3086 - RNA, 21 nt, synthetic construct
  source 1..21: mol_type = other RNA
gttaaccacggaggcgaacca

SEQ ID NO: 3087 - RNA, 21 nt, synthetic construct
  source 1..21: mol_type = other RNA
agcatcggcggcatggtgaac

SEQ ID NO: 3088 - RNA, 21 nt, synthetic construct
  source 1..21: mol_type = other RNA
ccagggagggaaaccactacc

SEQ ID NO: 3089 - RNA, 21 nt, synthetic construct
  source 1..21: mol_type = other RNA
accaaccagcaagacatcatg

SEQ ID NO: 3090 - RNA, 21 nt, synthetic construct
  source 1..21: mol_type = other RNA
gatatttcggcgaagcatgag

SEQ ID NO: 3091 - RNA, 21 nt, synthetic construct
  source 1..21: mol_type = other RNA
gttgacaaatccctcgttaga

SEQ ID NO: 3092 - DNA, 21 bp, synthetic construct
  source 1..21: mol_type = other DNA
atgaacagaggcggcgagcag

SEQ ID NO: 3093 - RNA, 21 nt, synthetic construct
  source 1..21: mol_type = other RNA
gtgaaagtctacggcgctctg

SEQ ID NO: 3094 - RNA, 21 nt, synthetic construct
  source 1..21: mol_type = other RNA
ggcaccaacagcgagatcgtg

SEQ ID NO: 3095 - RNA, 21 nt, synthetic construct
  source 1..21: mol_type = other RNA
agaacaggcaactctgacatc

SEQ ID NO: 3096 - RNA, 21 nt, synthetic construct
  source 1..21: mol_type = other RNA
tttggttatgggagtaataat

SEQ ID NO: 3097 - RNA, 21 nt, synthetic construct
  source 1..21: mol_type = other RNA
agctcccaaaaaacaagcctg

SEQ ID NO: 3098 - RNA, 21 nt, synthetic construct
  source 1..21: mol_type = other RNA
gacgtggagaaccccggcaag

SEQ ID NO: 3099 - RNA, 21 nt, synthetic construct
  source 1..21: mol_type = other RNA
accagcaaaccaggtacctac

SEQ ID NO: 3100 - RNA, 21 nt, synthetic construct
  source 1..21: mol_type = other RNA
accggatacgcggaccactcc

SEQ ID NO: 3101 - RNA, 21 nt, synthetic construct
  source 1..21: mol_type = other RNA
agtagtgagaagattccgagg

SEQ ID NO: 3102 - RNA, 21 nt, synthetic construct
  source 1..21: mol_type = other RNA
atgatggagaagatgatgctg

SEQ ID NO: 3103 - RNA, 21 nt, synthetic construct
  source 1..21: mol_type = other RNA
gatttgtctcggcatacgctt

SEQ ID NO: 3104 - RNA, 21 nt, synthetic construct
  source 1..21: mol_type = other RNA
ggctacgcccaccaggacgcc

SEQ ID NO: 3105 - RNA, 21 nt, synthetic construct
  source 1..21: mol_type = other RNA
aacagaaacaccagcgacatc

SEQ ID NO: 3106 - RNA, 21 nt, synthetic construct
  source 1..21: mol_type = other RNA
tctggagtatctgaagcccgc

SEQ ID NO: 3107 - RNA, 21 nt, synthetic construct
  source 1..21: mol_type = other RNA
gtgaacgccagcgccgccaac

SEQ ID NO: 3108 - RNA, 21 nt, synthetic construct
  source 1..21: mol_type = other RNA
gtgcagaagggcatcctgatc

SEQ ID NO: 3109 - RNA, 21 nt, synthetic construct
  source 1..21: mol_type = other RNA
gactcacgagcgctgacagaa

SEQ ID NO: 3110 - RNA, 21 nt, synthetic construct
  source 1..21: mol_type = other RNA
aacggcgtgagcagcgccatg

SEQ ID NO: 3111 - RNA, 21 nt, synthetic construct
  source 1..21: mol_type = other RNA
gacgacggcaagtacatcaga

SEQ ID NO: 3112 - RNA, 21 nt, synthetic construct
  source 1..21: mol_type = other RNA
accatgagcagcgccgacaga

SEQ ID NO: 3113 - RNA, 21 nt, synthetic construct
  source 1..21: mol_type = other RNA
cctgggagtagtaaggtgaat

SEQ ID NO: 3114 - RNA, 21 nt, synthetic construct
  source 1..21: mol_type = other RNA
gacgttaaatcagacacaaaa

SEQ ID NO: 3115 - RNA, 21 nt, synthetic construct
  source 1..21: mol_type = other RNA
gacgacgactcgacaacaggt

SEQ ID NO: 3116 - RNA, 21 nt, synthetic construct
  source 1..21: mol_type = other RNA
agcgtgaacggcatcaccaac

SEQ ID NO: 3117 - RNA, 21 nt, synthetic construct
  source 1..21: mol_type = other RNA
gatgtggagaatcctgggaag

SEQ ID NO: 3118 - RNA, 21 nt, synthetic construct
  source 1..21: mol_type = other RNA
ggcatcgccatcgtggagaac

SEQ ID NO: 3119 - RNA, 21 nt, synthetic construct
  source 1..21: mol_type = other RNA
ggctacgtgctgaaatcacca

SEQ ID NO: 3120 - RNA, 21 nt, synthetic construct
  source 1..21: mol_type = other RNA
caggtgaagagcaccgagacc

SEQ ID NO: 3121 - DNA, 21 bp, synthetic construct
  source 1..21: mol_type = other DNA
ccgagtgtgaatttgggtgtt

SEQ ID NO: 3122 - RNA, 21 nt, synthetic construct
  source 1..21: mol_type = other RNA
gctaaggcgccggaggctggg

SEQ ID NO: 3123 - RNA, 21 nt, synthetic construct
  source 1..21: mol_type = other RNA
accatcgagagaaccgccatg

SEQ ID NO: 3124 - RNA, 21 nt, synthetic construct
  source 1..21: mol_type = other RNA
cagcagagagtgagcagcagc

SEQ ID NO: 3125 - RNA, 21 nt, synthetic construct
  source 1..21: mol_type = other RNA
cagatttataatacggcgcat

SEQ ID NO: 3126 - RNA, 21 nt, synthetic construct
  source 1..21: mol_type = other RNA
ggcctgggcggccccagagag

SEQ ID NO: 3127 - RNA, 21 nt, synthetic construct
  source 1..21: mol_type = other RNA
gtgctgagccccaacatcgcc

SEQ ID NO: 3128 - RNA, 21 nt, synthetic construct
  source 1..21: mol_type = other RNA
aacgtggtcagctcggtgatg

SEQ ID NO: 3129 - RNA, 21 nt, synthetic construct
  source 1..21: mol_type = other RNA
ggcaacaacctggccaccccc

SEQ ID NO: 3130 - RNA, 21 nt, synthetic construct
  source 1..21: mol_type = other RNA
ggcaacaagctgcacatcgac

SEQ ID NO: 3131 - RNA, 21 nt, synthetic construct
  source 1..21: mol_type = other RNA
atgtactacgaacggacgatc

SEQ ID NO: 3132 - DNA, 21 bp, synthetic construct
  source 1..21: mol_type = other DNA
aggaaggagccgatgattttg

SEQ ID NO: 3133 - RNA, 21 nt, synthetic construct
  source 1..21: mol_type = other RNA
accctgaacggcgcctacaag

SEQ ID NO: 3134 - RNA, 21 nt, synthetic construct
  source 1..21: mol_type = other RNA
accatccaccagggcatcaag

SEQ ID NO: 3135 - RNA, 21 nt, synthetic construct
  source 1..21: mol_type = other RNA
attggttggaataatagtgtt

SEQ ID NO: 3136 - RNA, 21 nt, synthetic construct
  source 1..21: mol_type = other RNA
ggattcgcccaccaagacgca

SEQ ID NO: 3137 - RNA, 21 nt, synthetic construct
  source 1..21: mol_type = other RNA
cagattcgtggtatggaggtg

SEQ ID NO: 3138 - RNA, 21 nt, synthetic construct
  source 1..21: mol_type = other RNA
accatagaaaggacggctaac

SEQ ID NO: 3139 - RNA, 21 nt, synthetic construct
  source 1..21: mol_type = other RNA
attggtaagcagacgtatgat

SEQ ID NO: 3140 - RNA, 21 nt, synthetic construct
  source 1..21: mol_type = other RNA
tctctgggtaacatccaatcg

SEQ ID NO: 3141 - RNA, 21 nt, synthetic construct
  source 1..21: mol_type = other RNA
acatcgcaccaagtgtctatg

SEQ ID NO: 3142 - RNA, 21 nt, synthetic construct
  source 1..21: mol_type = other RNA
cacgcccctcctgctatggtg

SEQ ID NO: 3143 - RNA, 21 nt, synthetic construct
  source 1..21: mol_type = other RNA
aaaatcgacaccttcaaagtc

SEQ ID NO: 3144 - RNA, 21 nt, synthetic construct
  source 1..21: mol_type = other RNA
ggccaggccagagtgcccacc

SEQ ID NO: 3145 - RNA, 21 nt, synthetic construct
  source 1..21: mol_type = other RNA
gataaggcgccggagactggg

SEQ ID NO: 3146 - RNA, 21 nt, synthetic construct
  source 1..21: mol_type = other RNA
gccgccacaggcatcaaatta

SEQ ID NO: 3147 - RNA, 21 nt, synthetic construct
  source 1..21: mol_type = other RNA
cccaccagaggcgagagcgtg

SEQ ID NO: 3148 - RNA, 21 nt, synthetic construct
  source 1..21: mol_type = other RNA
atgatcaacagagtgagcacc

SEQ ID NO: 3149 - RNA, 21 nt, synthetic construct
  source 1..21: mol_type = other RNA
acacggagcccacccgtcagc

SEQ ID NO: 3150 - RNA, 21 nt, synthetic construct
  source 1..21: mol_type = other RNA
ttgaacgtcgcaggtctgatg

SEQ ID NO: 3151 - RNA, 21 nt, synthetic construct
  source 1..21: mol_type = other RNA
cgtactagtaatagtgatgtt

SEQ ID NO: 3152 - RNA, 21 nt, synthetic construct
  source 1..21: mol_type = other RNA
caggttttgaagaatggtgcg

SEQ ID NO: 3153 - RNA, 21 nt, synthetic construct
  source 1..21: mol_type = other RNA
cagagaagcaccagcgtgggc

SEQ ID NO: 3154 - RNA, 21 nt, synthetic construct
  source 1..21: mol_type = other RNA
agcgtgaccggcggcagaagc

SEQ ID NO: 3155 - RNA, 21 nt, synthetic construct
  source 1..21: mol_type = other RNA
tctaaagtccaaaacgtcgac

SEQ ID NO: 3156 - RNA, 21 nt, synthetic construct
  source 1..21: mol_type = other RNA
gtgttccagcaggtgcacgtg

SEQ ID NO: 3157 - DNA, 21 bp, synthetic construct
  source 1..21: mol_type = other DNA
agtggtgagaggaatcaggag

SEQ ID NO: 3158 - RNA, 21 nt, synthetic construct
  source 1..21: mol_type = other RNA
ggctacggcctgaccggcaac

SEQ ID NO: 3159 - RNA, 21 nt, synthetic construct
  source 1..21: mol_type = other RNA
tcgaagaatgggattactaat

SEQ ID NO: 3160 - RNA, 21 nt, synthetic construct
  source 1..21: mol_type = other RNA
cgtgataggtggaattcggaa

SEQ ID NO: 3161 - RNA, 21 nt, synthetic construct
  source 1..21: mol_type = other RNA
gggtatgaggaaaatcagcaa

SEQ ID NO: 3162 - RNA, 21 nt, synthetic construct
  source 1..21: mol_type = other RNA
actggtaaggggattgtgttg

SEQ ID NO: 3163 - RNA, 21 nt, synthetic construct
  source 1..21: mol_type = other RNA
gtgatcagcgccaagcacgag

SEQ ID NO: 3164 - RNA, 21 nt, synthetic construct
  source 1..21: mol_type = other RNA
gagaagagtccgcctgtgatg

SEQ ID NO: 3165 - RNA, 21 nt, synthetic construct
  source 1..21: mol_type = other RNA
ggggtaatcaaaacactgctc

SEQ ID NO: 3166 - RNA, 21 nt, synthetic construct
  source 1..21: mol_type = other RNA
gggaatgagcataatcagcat

SEQ ID NO: 3167 - RNA, 21 nt, synthetic construct
  source 1..21: mol_type = other RNA
gagtatggggcgcatagtgtt

SEQ ID NO: 3168 - RNA, 21 nt, synthetic construct
  source 1..21: mol_type = other RNA
caattgtccaacacgagcacc

SEQ ID NO: 3169 - RNA, 21 nt, synthetic construct
  source 1..21: mol_type = other RNA
aacagggacgactacaaccac

SEQ ID NO: 3170 - RNA, 21 nt, synthetic construct
  source 1..21: mol_type = other RNA
tcaggcacccaagacaccaga

SEQ ID NO: 3171 - RNA, 21 nt, synthetic construct
  source 1..21: mol_type = other RNA
agccaagcagccgaatcacac

SEQ ID NO: 3172 - RNA, 21 nt, synthetic construct
  source 1..21: mol_type = other RNA
aatagtggtgataaacagctg

SEQ ID NO: 3173 - RNA, 21 nt, synthetic construct
  source 1..21: mol_type = other RNA
ggtcaaatgaggagcgacgta

SEQ ID NO: 3174 - RNA, 21 nt, synthetic construct
  source 1..21: mol_type = other RNA
gggcttgtccaaaacgtcgac

SEQ ID NO: 3175 - RNA, 21 nt, synthetic construct
  source 1..21: mol_type = other RNA
gggtatgggttctctgggaat

SEQ ID NO: 3176 - DNA, 21 bp, synthetic construct
  source 1..21: mol_type = other DNA
ctggtgagcgacatggccaag

SEQ ID NO: 3177 - RNA, 21 nt, synthetic construct
  source 1..21: mol_type = other RNA
acgtcgccgaataatagtgtg

SEQ ID NO: 3178 - RNA, 21 nt, synthetic construct
  source 1..21: mol_type = other RNA
gggacgttgcctaataaggct

SEQ ID NO: 3179 - RNA, 21 nt, synthetic construct
  source 1..21: mol_type = other RNA
ggtatgtcgcgggtgagtgat

SEQ ID NO: 3180 - RNA, 21 nt, synthetic construct
  source 1..21: mol_type = other RNA
ggcggcgccggcctgaaggac

SEQ ID NO: 3181 - RNA, 21 nt, synthetic construct
  source 1..21: mol_type = other RNA
gggcagtcgcgggttccgatg

SEQ ID NO: 3182 - RNA, 21 nt, synthetic construct
  source 1..21: mol_type = other RNA
acgggcaaaggagtggaactt

SEQ ID NO: 3183 - RNA, 21 nt, synthetic construct
  source 1..21: mol_type = other RNA
gtgacccaggcccaggcccag

SEQ ID NO: 3184 - RNA, 21 nt, synthetic construct
  source 1..21: mol_type = other RNA
aaggacagaaacgacaacgcc

SEQ ID NO: 3185 - RNA, 21 nt, synthetic construct
  source 1..21: mol_type = other RNA
aggacctctaactctgacgtg

SEQ ID NO: 3186 - RNA, 21 nt, synthetic construct
  source 1..21: mol_type = other RNA
gataaggttggggttgctgtt

SEQ ID NO: 3187 - RNA, 21 nt, synthetic construct
  source 1..21: mol_type = other RNA
tcgattagtcatgtgattaat

SEQ ID NO: 3188 - RNA, 21 nt, synthetic construct
  source 1..21: mol_type = other RNA
accatcaacaaggtgatcatc

SEQ ID NO: 3189 - RNA, 21 nt, synthetic construct
  source 1..21: mol_type = other RNA
ggtgctcgtggggagcatatg

SEQ ID NO: 3190 - RNA, 21 nt, synthetic construct
  source 1..21: mol_type = other RNA
cccaccagaggcgtgaacgtg

SEQ ID NO: 3191 - RNA, 21 nt, synthetic construct
  source 1..21: mol_type = other RNA
ggcatccaagccaatgcccac

SEQ ID NO: 3192 - RNA, 21 nt, synthetic construct
  source 1..21: mol_type = other RNA
ggtatgacgcagaagatgatg

SEQ ID NO: 3193 - RNA, 21 nt, synthetic construct
  source 1..21: mol_type = other RNA
ccgattaatcaggttattatg

SEQ ID NO: 3194 - RNA, 21 nt, synthetic construct
  source 1..21: mol_type = other RNA
gttatcgcgacaaaaagcatc

SEQ ID NO: 3195 - RNA, 21 nt, synthetic construct
  source 1..21: mol_type = other RNA
caaaccaaagtggactcagtc

SEQ ID NO: 3196 - RNA, 21 nt, synthetic construct
  source 1..21: mol_type = other RNA
ggcacctacagcgagatggtg

SEQ ID NO: 3197 - RNA, 21 nt, synthetic construct
  source 1..21: mol_type = other RNA
ggcgtgaaccagaacatgaga

SEQ ID NO: 3198 - RNA, 21 nt, synthetic construct
  source 1..21: mol_type = other RNA
agcgagaagaacgagggcctg

SEQ ID NO: 3199 - RNA, 21 nt, synthetic construct
  source 1..21: mol_type = other RNA
cccgacgtgagaatcagcgtg

SEQ ID NO: 3200 - RNA, 21 nt, synthetic construct
  source 1..21: mol_type = other RNA
agtttggggaatattcagtct

SEQ ID NO: 3201 - RNA, 21 nt, synthetic construct
  source 1..21: mol_type = other RNA
aagatgaccggcggcgacttc

SEQ ID NO: 3202 - RNA, 21 nt, synthetic construct
  source 1..21: mol_type = other RNA
cggcttagtgggttggaggtg

SEQ ID NO: 3203 - RNA, 21 nt, synthetic construct
  source 1..21: mol_type = other RNA
atcagagaccagaccgccatc

SEQ ID NO: 3204 - RNA, 21 nt, synthetic construct
  source 1..21: mol_type = other RNA
tatgttaagagttctgagact

SEQ ID NO: 3205 - RNA, 21 nt, synthetic construct
  source 1..21: mol_type = other RNA
ttcaacaacaacagccagatg

SEQ ID NO: 3206 - RNA, 21 nt, synthetic construct
  source 1..21: mol_type = other RNA
atcaaggagaccatgaagctg

SEQ ID NO: 3207 - RNA, 21 nt, synthetic construct
  source 1..21: mol_type = other RNA
gtggagagaggcgtgaccccc

SEQ ID NO: 3208 - RNA, 21 nt, synthetic construct
  source 1..21: mol_type = other RNA
gaaaaaggccctctcgtggcc

SEQ ID NO: 3209 - RNA, 21 nt, synthetic construct
  source 1..21: mol_type = other RNA
cggacctccaacggcgacatc

SEQ ID NO: 3210 - RNA, 21 nt, synthetic construct
  source 1..21: mol_type = other RNA
ggctacgtgctgaagagcgcc

SEQ ID NO: 3211 - RNA, 21 nt, synthetic construct
  source 1..21: mol_type = other RNA
agcatgaacggcgtgaccaac

SEQ ID NO: 3212 - RNA, 21 nt, synthetic construct
  source 1..21: mol_type = other RNA
gtgactactcttggtgcggtt

SEQ ID NO: 3213 - RNA, 21 nt, synthetic construct
  source 1..21: mol_type = other RNA
agcagagacgacaccgtgttc

SEQ ID NO: 3214 - RNA, 21 nt, synthetic construct
  source 1..21: mol_type = other RNA
cgcagccccaacaacagcgaa

SEQ ID NO: 3215 - RNA, 21 nt, synthetic construct
  source 1..21: mol_type = other RNA
ccaagactggacgtgaaccga

SEQ ID NO: 3216 - RNA, 21 nt, synthetic construct
  source 1..21: mol_type = other RNA
gaaaaaggcccacacatcgcc

SEQ ID NO: 3217 - DNA, 21 bp, synthetic construct
  source 1..21: mol_type = other DNA
agctcccaaaaaaacaagcct

SEQ ID NO: 3218 - RNA, 21 nt, synthetic construct
  source 1..21: mol_type = other RNA
aacaagaacaccagcgacaac

SEQ ID NO: 3219 - RNA, 21 nt, synthetic construct
  source 1..21: mol_type = other RNA
gcaaaagaaatgcgtgctctg

SEQ ID NO: 3220 - RNA, 21 nt, synthetic construct
  source 1..21: mol_type = other RNA
gacaaaaacgcatctactgga

SEQ ID NO: 3221 - RNA, 21 nt, synthetic construct
  source 1..21: mol_type = other RNA
agaagcgtgtggaccgagcag

SEQ ID NO: 3222 - RNA, 21 nt, synthetic construct
  source 1..21: mol_type = other RNA
ggctaccaggacaaccagcac

SEQ ID NO: 3223 - RNA, 21 nt, synthetic construct
  source 1..21: mol_type = other RNA
gcgatgaatgggattactaat

SEQ ID NO: 3224 - RNA, 21 nt, synthetic construct
  source 1..21: mol_type = other RNA
aggaaggatgtgatgaatgtt

SEQ ID NO: 3225 - RNA, 21 nt, synthetic construct
  source 1..21: mol_type = other RNA
gttaacgcctccgcagcaaac

SEQ ID NO: 3226 - RNA, 21 nt, synthetic construct
  source 1..21: mol_type = other RNA
ttgagggtgcgtgatgggtat

SEQ ID NO: 3227 - RNA, 21 nt, synthetic construct
  source 1..21: mol_type = other RNA
gtgagtgctacgaagagtaat

SEQ ID NO: 3228 - RNA, 21 nt, synthetic construct
  source 1..21: mol_type = other RNA
ggcatccaggccaaggccaac

SEQ ID NO: 3229 - RNA, 21 nt, synthetic construct
  source 1..21: mol_type = other RNA
aggctcaaccacgtcgacaca

SEQ ID NO: 3230 - RNA, 21 nt, synthetic construct
  source 1..21: mol_type = other RNA
accctgctgcccggctacctg

SEQ ID NO: 3231 - RNA, 21 nt, synthetic construct
  source 1..21: mol_type = other RNA
ggcaccctgcccaacaaggcc

SEQ ID NO: 3232 - RNA, 21 nt, synthetic construct
  source 1..21: mol_type = other RNA
caagtcttaatcaacggagct

SEQ ID NO: 3233 - RNA, 21 nt, synthetic construct
  source 1..21: mol_type = other RNA
agcggcgacagcgtgagagcc

SEQ ID NO: 3234 - RNA, 21 nt, synthetic construct
  source 1..21: mol_type = other RNA
cccaccagaggcgagaacgag

SEQ ID NO: 3235 - RNA, 21 nt, synthetic construct
  source 1..21: mol_type = other RNA
caggacggcagcagcaccgtg

SEQ ID NO: 3236 - RNA, 21 nt, synthetic construct
  source 1..21: mol_type = other RNA
aataatcagcggaatccgctg

SEQ ID NO: 3237 - RNA, 21 nt, synthetic construct
  source 1..21: mol_type = other RNA
tctaagagtaatgagacgatt

SEQ ID NO: 3238 - RNA, 21 nt, synthetic construct
  source 1..21: mol_type = other RNA
tccctccttaaaaacgtcgac

SEQ ID NO: 3239 - RNA, 21 nt, synthetic construct
  source 1..21: mol_type = other RNA
aaggtggtcaccagcgcaatg

SEQ ID NO: 3240 - RNA, 21 nt, synthetic construct
  source 1..21: mol_type = other RNA
gccaacatagaatgcgcagtc

SEQ ID NO: 3241 - RNA, 21 nt, synthetic construct
  source 1..21: mol_type = other RNA
gctcgcaacgtcatcggagga

SEQ ID NO: 3242 - RNA, 21 nt, synthetic construct
  source 1..21: mol_type = other RNA
gtgttgagtccgaataatgtg

SEQ ID NO: 3243 - RNA, 21 nt, synthetic construct
  source 1..21: mol_type = other RNA
atgaaagaaaaaatcatactc

SEQ ID NO: 3244 - RNA, 21 nt, synthetic construct
  source 1..21: mol_type = other RNA
aacggcgagagaaaccaggtg

SEQ ID NO: 3245 - RNA, 21 nt, synthetic construct
  source 1..21: mol_type = other RNA
ggaagcttaaacaacgcgtcc

SEQ ID NO: 3246 - RNA, 21 nt, synthetic construct
  source 1..21: mol_type = other RNA
atgcatcatgcgtctaaggag

SEQ ID NO: 3247 - RNA, 21 nt, synthetic construct
  source 1..21: mol_type = other RNA
gagaagagccccaccgtgatg

SEQ ID NO: 3248 - RNA, 21 nt, synthetic construct
  source 1..21: mol_type = other RNA
ctgagtaaggttgatagtgtg

SEQ ID NO: 3249 - RNA, 21 nt, synthetic construct
  source 1..21: mol_type = other RNA
ggcagcaacctgaccaccccc

SEQ ID NO: 3250 - RNA, 21 nt, synthetic construct
  source 1..21: mol_type = other RNA
gttgaaaacggtgtcgacaaa

SEQ ID NO: 3251 - RNA, 21 nt, synthetic construct
  source 1..21: mol_type = other RNA
ttgaaggttgccggactgacc

SEQ ID NO: 3252 - RNA, 21 nt, synthetic construct
  source 1..21: mol_type = other RNA
agtggggttagtgatgggcgt

SEQ ID NO: 3253 - RNA, 21 nt, synthetic construct
  source 1..21: mol_type = other RNA
agtagggatgatactatttct

SEQ ID NO: 3254 - RNA, 21 nt, synthetic construct
  source 1..21: mol_type = other RNA
gttaaccacggcggagttcaa

SEQ ID NO: 3255 - RNA, 21 nt, synthetic construct
  source 1..21: mol_type = other RNA
gatgtgaagaatcctgggaag

SEQ ID NO: 3256 - RNA, 21 nt, synthetic construct
  source 1..21: mol_type = other RNA
cacgtcaaatcatacgacacc

SEQ ID NO: 3257 - RNA, 21 nt, synthetic construct
  source 1..21: mol_type = other RNA
tctgaatctaaacaaatcgcc

SEQ ID NO: 3258 - RNA, 21 nt, synthetic construct
  source 1..21: mol_type = other RNA
tcccaaggtcccgaatctctg

SEQ ID NO: 3259 - RNA, 21 nt, synthetic construct
  source 1..21: mol_type = other RNA
cagatcagagccatggagaag

SEQ ID NO: 3260 - RNA, 21 nt, synthetic construct
  source 1..21: mol_type = other RNA
acggaaacagggacccttctc

SEQ ID NO: 3261 - RNA, 21 nt, synthetic construct
  source 1..21: mol_type = other RNA
gacctgagaaccagcaccctg

SEQ ID NO: 3262 - RNA, 21 nt, synthetic construct
  source 1..21: mol_type = other RNA
accaaatacaacgaaagcctc

SEQ ID NO: 3263 - RNA, 21 nt, synthetic construct
  source 1..21: mol_type = other RNA
gcgaggaatctgaatgagggt

SEQ ID NO: 3264 - RNA, 21 nt, synthetic construct
  source 1..21: mol_type = other RNA
gggggataccaaaacatgagg

SEQ ID NO: 3265 - RNA, 21 nt, synthetic construct
  source 1..21: mol_type = other RNA
actatcgaagccccagcaatg

SEQ ID NO: 3266 - RNA, 21 nt, synthetic construct
  source 1..21: mol_type = other RNA
gtggaccagaagagcgtgacc

SEQ ID NO: 3267 - RNA, 21 nt, synthetic construct
  source 1..21: mol_type = other RNA
agctacctgccccaggtgacc

SEQ ID NO: 3268 - RNA, 21 nt, synthetic construct
  source 1..21: mol_type = other RNA
ggatacgtggtgaaatccagt

SEQ ID NO: 3269 - RNA, 21 nt, synthetic construct
  source 1..21: mol_type = other RNA
atcggccagggcgtgagcgtg

SEQ ID NO: 3270 - RNA, 21 nt, synthetic construct
  source 1..21: mol_type = other RNA
gtggacagaaccaccgacggc

SEQ ID NO: 3271 - RNA, 21 nt, synthetic construct
  source 1..21: mol_type = other RNA
gtaacaataggcaacggcctc

SEQ ID NO: 3272 - DNA, 21 bp, synthetic construct
  source 1..21: mol_type = other DNA
aagagagagcacgacggctac

SEQ ID NO: 3273 - RNA, 21 nt, synthetic construct
  source 1..21: mol_type = other RNA
ggcgtgaacagcaccctgcag

SEQ ID NO: 3274 - RNA, 21 nt, synthetic construct
  source 1..21: mol_type = other RNA
gtggtgcacgttaacgtagca

SEQ ID NO: 3275 - RNA, 21 nt, synthetic construct
  source 1..21: mol_type = other RNA
gccgtactacccatagcctca

SEQ ID NO: 3276 - RNA, 21 nt, synthetic construct
  source 1..21: mol_type = other RNA
gtgcgggcacccgacacacac

SEQ ID NO: 3277 - RNA, 21 nt, synthetic construct
  source 1..21: mol_type = other RNA
catgataagagttctgagaat

SEQ ID NO: 3278 - RNA, 21 nt, synthetic construct
  source 1..21: mol_type = other RNA
atggagcatcgtaatgatggg

SEQ ID NO: 3279 - RNA, 21 nt, synthetic construct
  source 1..21: mol_type = other RNA
agcggcgccatgggcagactg

SEQ ID NO: 3280 - RNA, 21 nt, synthetic construct
  source 1..21: mol_type = other RNA
acactgcctaacaactctgaa

SEQ ID NO: 3281 - RNA, 21 nt, synthetic construct
  source 1..21: mol_type = other RNA
ttcctgaacggagtagtcctt

SEQ ID NO: 3282 - RNA, 21 nt, synthetic construct
  source 1..21: mol_type = other RNA
ctgggcaccagcgtgggcagc

SEQ ID NO: 3283 - RNA, 21 nt, synthetic construct
  source 1..21: mol_type = other RNA
tacttcgcccccgagatgagc

SEQ ID NO: 3284 - RNA, 21 nt, synthetic construct
  source 1..21: mol_type = other RNA
accatccagcaagacaacatg

SEQ ID NO: 3285 - RNA, 21 nt, synthetic construct
  source 1..21: mol_type = other RNA
actgtgtcacacgtaatcaac

SEQ ID NO: 3286 - RNA, 21 nt, synthetic construct
  source 1..21: mol_type = other RNA
gtgaacgtgcaggccgagaga

SEQ ID NO: 3287 - RNA, 21 nt, synthetic construct
  source 1..21: mol_type = other RNA
acgattaatcagcttattatg

SEQ ID NO: 3288 - RNA, 21 nt, synthetic construct
  source 1..21: mol_type = other RNA
ctgatgaacggcatcaccaac

SEQ ID NO: 3289 - RNA, 21 nt, synthetic construct
  source 1..21: mol_type = other RNA
aatgttgtgtctagtgctttg

SEQ ID NO: 3290 - RNA, 21 nt, synthetic construct
  source 1..21: mol_type = other RNA
accatccacctggacatcatg

SEQ ID NO: 3291 - RNA, 21 nt, synthetic construct
  source 1..21: mol_type = other RNA
atagctgttggcgctaaatct

SEQ ID NO: 3292 - RNA, 21 nt, synthetic construct
  source 1..21: mol_type = other RNA
gccgacgggcttctgaaaatg

SEQ ID NO: 3293 - RNA, 21 nt, synthetic construct
  source 1..21: mol_type = other RNA
cttgtggatcataattctgtg

SEQ ID NO: 3294 - RNA, 21 nt, synthetic construct
  source 1..21: mol_type = other RNA
ccagggaaagaacaactgctg

SEQ ID NO: 3295 - RNA, 21 nt, synthetic construct
  source 1..21: mol_type = other RNA
accagcagcccccccgacagc

SEQ ID NO: 3296 - RNA, 21 nt, synthetic construct
  source 1..21: mol_type = other RNA
atgctggccagagtggtgccc

SEQ ID NO: 3297 - RNA, 21 nt, synthetic construct
  source 1..21: mol_type = other RNA
gacaaaaaccccgcaactggc

SEQ ID NO: 3298 - RNA, 21 nt, synthetic construct
  source 1..21: mol_type = other RNA
atctacgactacagccacacc

SEQ ID NO: 3299 - RNA, 21 nt, synthetic construct
  source 1..21: mol_type = other RNA
gggaggcataatgagattacg

SEQ ID NO: 3300 - RNA, 21 nt, synthetic construct
  source 1..21: mol_type = other RNA
gaaatcaaagaccgggttctc

SEQ ID NO: 3301 - RNA, 21 nt, synthetic construct
  source 1..21: mol_type = other RNA
tccggattcgcggtgcactcc

SEQ ID NO: 3302 - RNA, 21 nt, synthetic construct
  source 1..21: mol_type = other RNA
gttaaggtttatggggcgttg

SEQ ID NO: 3303 - RNA, 21 nt, synthetic construct
  source 1..21: mol_type = other RNA
agcctgctgcccggctaccac

SEQ ID NO: 3304 - RNA, 21 nt, synthetic construct
  source 1..21: mol_type = other RNA
gactacccctctaggggaatc

SEQ ID NO: 3305 - RNA, 21 nt, synthetic construct
  source 1..21: mol_type = other RNA
gcccccaccggcatcaagagc

SEQ ID NO: 3306 - RNA, 21 nt, synthetic construct
  source 1..21: mol_type = other RNA
gcgttgattgttggtcagaag

SEQ ID NO: 3307 - RNA, 21 nt, synthetic construct
  source 1..21: mol_type = other RNA
aagctgggccacaactacggc

SEQ ID NO: 3308 - RNA, 21 nt, synthetic construct
  source 1..21: mol_type = other RNA
agcctggtgcagaaggtggag

SEQ ID NO: 3309 - RNA, 21 nt, synthetic construct
  source 1..21: mol_type = other RNA
aaactagcacacaactacgac

SEQ ID NO: 3310 - RNA, 21 nt, synthetic construct
  source 1..21: mol_type = other RNA
caggtgggcagcgccaccgtg

SEQ ID NO: 3311 - RNA, 21 nt, synthetic construct
  source 1..21: mol_type = other RNA
ttggatatgtctcagaggggt

SEQ ID NO: 3312 - RNA, 21 nt, synthetic construct
  source 1..21: mol_type = other RNA
attaatgagcaggcggagcgt

SEQ ID NO: 3313 - RNA, 21 nt, synthetic construct
  source 1..21: mol_type = other RNA
ctcgtgaacgacgtaacccaa

SEQ ID NO: 3314 - RNA, 21 nt, synthetic construct
  source 1..21: mol_type = other RNA
agaagcctgaacaacgccacc

SEQ ID NO: 3315 - RNA, 21 nt, synthetic construct
  source 1..21: mol_type = other RNA
gttgttttgcctattgcgtcg

SEQ ID NO: 3316 - RNA, 21 nt, synthetic construct
  source 1..21: mol_type = other RNA
gtgagccaggagcccagcaga

SEQ ID NO: 3317 - RNA, 21 nt, synthetic construct
  source 1..21: mol_type = other RNA
gacaagagcgccgccaccggc

SEQ ID NO: 3318 - RNA, 21 nt, synthetic construct
  source 1..21: mol_type = other RNA
cgggatggtgttattttgatt

SEQ ID NO: 3319 - RNA, 21 nt, synthetic construct
  source 1..21: mol_type = other RNA
gccctgagcgtgggccagaag

SEQ ID NO: 3320 - RNA, 21 nt, synthetic construct
  source 1..21: mol_type = other RNA
ggcttacaacccaacgtctca

SEQ ID NO: 3321 - RNA, 21 nt, synthetic construct
  source 1..21: mol_type = other RNA
ggtcttcgaggcgaagacatg

SEQ ID NO: 3322 - RNA, 21 nt, synthetic construct
  source 1..21: mol_type = other RNA
ctgtcccaaaaaacttcactg

SEQ ID NO: 3323 - RNA, 21 nt, synthetic construct
  source 1..21: mol_type = other RNA
ggtattaatttggcgactcct

SEQ ID NO: 3324 - RNA, 21 nt, synthetic construct
  source 1..21: mol_type = other RNA
cccgagaacaccaagatcaac

SEQ ID NO: 3325 - RNA, 21 nt, synthetic construct
  source 1..21: mol_type = other RNA
agcatgtacggcatcaccaac

SEQ ID NO: 3326 - RNA, 21 nt, synthetic construct
  source 1..21: mol_type = other RNA
atgaacggcgtgagcccccac

SEQ ID NO: 3327 - RNA, 21 nt, synthetic construct
  source 1..21: mol_type = other RNA
aaagacactcaacacctaaac

SEQ ID NO: 3328 - RNA, 21 nt, synthetic construct
  source 1..21: mol_type = other RNA
ttggcgaatcatactgagatt

SEQ ID NO: 3329 - RNA, 21 nt, synthetic construct
  source 1..21: mol_type = other RNA
cggacctccaacagcgagata

SEQ ID NO: 3330 - RNA, 21 nt, synthetic construct
  source 1..21: mol_type = other RNA
ggttatggtcttaagagttct

SEQ ID NO: 3331 - RNA, 21 nt, synthetic construct
  source 1..21: mol_type = other RNA
ggcctgagccagaagatgatg

SEQ ID NO: 3332 - RNA, 21 nt, synthetic construct
  source 1..21: mol_type = other RNA
gcagacgttcgtaacagcgtc

SEQ ID NO: 3333 - RNA, 21 nt, synthetic construct
  source 1..21: mol_type = other RNA
ccattcgactctcccagcaca

SEQ ID NO: 3334 - RNA, 21 nt, synthetic construct
  source 1..21: mol_type = other RNA
caagttaagagttctgagact

SEQ ID NO: 3335 - RNA, 21 nt, synthetic construct
  source 1..21: mol_type = other RNA
agcgacgccgcaagtaaagtc

SEQ ID NO: 3336 - RNA, 21 nt, synthetic construct
  source 1..21: mol_type = other RNA
agtctgatgccaggataccac

SEQ ID NO: 3337 - RNA, 21 nt, synthetic construct
  source 1..21: mol_type = other RNA
tggcacctgactgaaaactgg

SEQ ID NO: 3338 - RNA, 21 nt, synthetic construct
  source 1..21: mol_type = other RNA
cagtacgaggtggtgaacaga

SEQ ID NO: 3339 - RNA, 21 nt, synthetic construct
  source 1..21: mol_type = other RNA
cgtgatagggggaattcggat

SEQ ID NO: 3340 - RNA, 21 nt, synthetic construct
  source 1..21: mol_type = other RNA
ggtctgactgggtattctcgt

SEQ ID NO: 3341 - RNA, 21 nt, synthetic construct
  source 1..21: mol_type = other RNA
acgattaatcaggttattatt

SEQ ID NO: 3342 - RNA, 21 nt, synthetic construct
  source 1..21: mol_type = other RNA
gtgctgagacccaacatcgtg

SEQ ID NO: 3343 - RNA, 21 nt, synthetic construct
  source 1..21: mol_type = other RNA
catgtggagaatcctgggaag

SEQ ID NO: 3344 - RNA, 21 nt, synthetic construct
  source 1..21: mol_type = other RNA
gttaatgtgcaggcggagcgt

SEQ ID NO: 3345 - RNA, 21 nt, synthetic construct
  source 1..21: mol_type = other RNA
gtgaagaactacggcgccctg

SEQ ID NO: 3346 - RNA, 21 nt, synthetic construct
  source 1..21: mol_type = other RNA
gttcgtgagccgggtacgcat

SEQ ID NO: 3347 - DNA, 21 bp, synthetic construct
  source 1..21: mol_type = other DNA
ccaaacaacttaacatcaagt

SEQ ID NO: 3348 - RNA, 21 nt, synthetic construct
  source 1..21: mol_type = other RNA
caattgtcatcaacctctaca

SEQ ID NO: 3349 - RNA, 21 nt, synthetic construct
  source 1..21: mol_type = other RNA
ggatacggcttatcaggctca

SEQ ID NO: 3350 - RNA, 21 nt, synthetic construct
  source 1..21: mol_type = other RNA
ggcaaggccatcgtggagaac

SEQ ID NO: 3351 - RNA, 21 nt, synthetic construct
  source 1..21: mol_type = other RNA
ggcctggtgggcaccagagag

SEQ ID NO: 3352 - RNA, 21 nt, synthetic construct
  source 1..21: mol_type = other RNA
gacaaaaacgcagcaaccggc

SEQ ID NO: 3353 - RNA, 21 nt, synthetic construct
  source 1..21: mol_type = other RNA
aaatggaccgtgaaccacgaa

SEQ ID NO: 3354 - RNA, 21 nt, synthetic construct
  source 1..21: mol_type = other RNA
attcatgggattgctccgagt

SEQ ID NO: 3355 - RNA, 21 nt, synthetic construct
  source 1..21: mol_type = other RNA
ggcaccctgcccaacatggcc

SEQ ID NO: 3356 - RNA, 21 nt, synthetic construct
  source 1..21: mol_type = other RNA
ctggaaaaaaacggattaatc

SEQ ID NO: 3357 - RNA, 21 nt, synthetic construct
  source 1..21: mol_type = other RNA
ctgaaggtggccggcctgacc

SEQ ID NO: 3358 - RNA, 21 nt, synthetic construct
  source 1..21: mol_type = other RNA
ggcgtgagcgccagattccag

SEQ ID NO: 3359 - RNA, 21 nt, synthetic construct
  source 1..21: mol_type = other RNA
ggcctgaccgtgtacagccac

SEQ ID NO: 3360 - RNA, 21 nt, synthetic construct
  source 1..21: mol_type = other RNA
aaaataaacaccttcaaagtg

SEQ ID NO: 3361 - RNA, 21 nt, synthetic construct
  source 1..21: mol_type = other RNA
gagatttataatacggcgctt

SEQ ID NO: 3362 - RNA, 21 nt, synthetic construct
  source 1..21: mol_type = other RNA
atgctggcccacgtggtgacc

SEQ ID NO: 3363 - RNA, 21 nt, synthetic construct
  source 1..21: mol_type = other RNA
gtgactattgtgaatgggatt

SEQ ID NO: 3364 - RNA, 21 nt, synthetic construct
  source 1..21: mol_type = other RNA
gatgtgaagtctgatactcag

SEQ ID NO: 3365 - RNA, 21 nt, synthetic construct
  source 1..21: mol_type = other RNA
gagatctacaacaccgtgcac

SEQ ID NO: 3366 - RNA, 21 nt, synthetic construct
  source 1..21: mol_type = other RNA
accgtaatgcagaagagctcg

SEQ ID NO: 3367 - RNA, 21 nt, synthetic construct
  source 1..21: mol_type = other RNA
ggggtggaaaaagctgatcgg

SEQ ID NO: 3368 - RNA, 21 nt, synthetic construct
  source 1..21: mol_type = other RNA
cgaaactactctaccctcgtg

SEQ ID NO: 3369 - RNA, 21 nt, synthetic construct
  source 1..21: mol_type = other RNA
gagaccatcggcaacggctac

SEQ ID NO: 3370 - RNA, 21 nt, synthetic construct
  source 1..21: mol_type = other RNA
gttagtcaggcccaagctcaa

SEQ ID NO: 3371 - RNA, 21 nt, synthetic construct
  source 1..21: mol_type = other RNA
ctcgttcggaacggaagagaa

SEQ ID NO: 3372 - DNA, 21 bp, synthetic construct
  source 1..21: mol_type = other DNA
aacagaaacacaagcgagaag

SEQ ID NO: 3373 - RNA, 21 nt, synthetic construct
  source 1..21: mol_type = other RNA
caaagcagaggaatggaaatg

SEQ ID NO: 3374 - RNA, 21 nt, synthetic construct
  source 1..21: mol_type = other RNA
ctggacacccagcacctgatc

SEQ ID NO: 3375 - RNA, 21 nt, synthetic construct
  source 1..21: mol_type = other RNA
gtactggccccagggacccac

SEQ ID NO: 3376 - DNA, 21 bp, synthetic construct
  source 1..21: mol_type = other DNA
gcgatgagtcttagtgagggg

SEQ ID NO: 3377 - DNA, 21 bp, synthetic construct
  source 1..21: mol_type = other DNA
cagacgtctagagatactagg

SEQ ID NO: 3378 - DNA, 21 bp, synthetic construct
  source 1..21: mol_type = other DNA
accagcagccaccccgtggtg

SEQ ID NO: 3379 - DNA, 21 bp, synthetic construct
  source 1..21: mol_type = other DNA
gcgatgcgtcttagagagggg

SEQ ID NO: 3380 - DNA, 21 bp, synthetic construct
  source 1..21: mol_type = other DNA
gatgctcgtgaggagcatatg

SEQ ID NO: 3381 - DNA, 21 bp, synthetic construct
  source 1..21: mol_type = other DNA
accagcagccccccgtggtgc

SEQ ID NO: 3382 - DNA, 21 bp, synthetic construct
  source 1..21: mol_type = other DNA
aacagaaacaccagagagaag

SEQ ID NO: 3383 - DNA, 21 bp, synthetic construct
  source 1..21: mol_type = other DNA
cagacgtctagtgatacaagg

SEQ ID NO: 3384 - RNA, 21 nt, synthetic construct
  source 1..21: mol_type = other RNA
cttaatgtggctgggctttcg

SEQ ID NO: 3385 - DNA, 21 bp, synthetic construct
  source 1..21: mol_type = other DNA
cagacgactagtgatactagg

SEQ ID NO: 3386 - DNA, 21 bp, synthetic construct
  source 1..21: mol_type = other DNA
gtcaaaatatacggcgcccgg

SEQ ID NO: 3387 - DNA, 21 bp, synthetic construct
  source 1..21: mol_type = other DNA
cagaagtctagtgatactagg

SEQ ID NO: 3388 - RNA, 21 nt, synthetic construct
  source 1..21: mol_type = other RNA
gcgaagcgtcttagtgagggg

SEQ ID NO: 3389 - DNA, 21 bp, synthetic construct
  source 1..21: mol_type = other DNA
gttgctagtgaggagcatatg

SEQ ID NO: 3390 - DNA, 21 bp, synthetic construct
  source 1..21: mol_type = other DNA
cagacgtctagtgaaactagg

SEQ ID NO: 3391 - DNA, 21 bp, synthetic construct
  source 1..21: mol_type = other DNA
gcgatgcgtcatagtgagggg

SEQ ID NO: 3392 - DNA, 21 bp, synthetic construct
  source 1..21: mol_type = other DNA
gttgctcgtgaggagcataag

SEQ ID NO: 3393 - DNA, 21 bp, synthetic construct
  source 1..21: mol_type = other DNA
gagatgcgtcttagtgagggg

SEQ ID NO: 3394 - DNA, 21 bp, synthetic construct
  source 1..21: mol_type = other DNA
gtagctcgtgaggagcatatg

SEQ ID NO: 3395 - DNA, 21 bp, synthetic construct
  source 1..21: mol_type = other DNA
ggctccaagcaaacacaaaac

SEQ ID NO: 3396 - DNA, 21 bp, synthetic construct
  source 1..21: mol_type = other DNA
gttgctcgagaggagcatatg

SEQ ID NO: 3397 - DNA, 21 bp, synthetic construct
  source 1..21: mol_type = other DNA
ggctacatgcaaacacaaaac

SEQ ID NO: 3398 - DNA, 21 bp, synthetic construct
  source 1..21: mol_type = other DNA
cagacgtcaagtgatactagg

SEQ ID NO: 3399 - DNA, 21 bp, synthetic construct
  source 1..21: mol_type = other DNA
accagcagcccccccgtggag

SEQ ID NO: 3400 - DNA, 21 bp, synthetic construct
  source 1..21: mol_type = other DNA
cagatcagaggcacagagatg

SEQ ID NO: 3401 - DNA, 21 bp, synthetic construct
  source 1..21: mol_type = other DNA
gcgatgcgtctaagtgagggg

SEQ ID NO: 3402 - DNA, 21 bp, synthetic construct
  source 1..21: mol_type = other DNA
accagcagcccccccgaggtg

SEQ ID NO: 3403 - DNA, 21 bp, synthetic construct
  source 1..21: mol_type = other DNA
gtcttccaacaaggacacgat

SEQ ID NO: 3404 - DNA, 21 bp, synthetic construct
  source 1..21: mol_type = other DNA
gcgatgcgacttagtgagggg

SEQ ID NO: 3405 - DNA, 21 bp, synthetic construct
  source 1..21: mol_type = other DNA
gttgctcgtgaggagcaaatg

SEQ ID NO: 3406 - DNA, 21 bp, synthetic construct
  source 1..21: mol_type = other DNA
gttgctcgtgaggagaatatg

SEQ ID NO: 3407 - DNA, 21 bp, synthetic construct
  source 1..21: mol_type = other DNA
ggctccatgaaaacacaaaac

SEQ ID NO: 3408 - DNA, 21 bp, synthetic construct
  source 1..21: mol_type = other DNA
gttgatcgtgaggagcatatg

SEQ ID NO: 3409 - DNA, 21 bp, synthetic construct
  source 1..21: mol_type = other DNA
gtgagagacagcagcaacaga

SEQ ID NO: 3410 - DNA, 21 bp, synthetic construct
  source 1..21: mol_type = other DNA
cagacgtctagtgataatagg

SEQ ID NO: 3411 - DNA, 21 bp, synthetic construct
  source 1..21: mol_type = other DNA
gagagcgacagcagcaacaga

SEQ ID NO: 3412 - DNA, 21 bp, synthetic construct
  source 1..21: mol_type = other DNA
ggcagacacaacgagacaccc

SEQ ID NO: 3413 - DNA, 21 bp, synthetic construct
  source 1..21: mol_type = other DNA
accagcagccccccagtggtg

SEQ ID NO: 3414 - DNA, 21 bp, synthetic construct
  source 1..21: mol_type = other DNA
aatggtcagggtgtttcttat

SEQ ID NO: 3415 - DNA, 21 bp, synthetic construct
  source 1..21: mol_type = other DNA
gcgatgcgtattagtgagggg

SEQ ID NO: 3416 - DNA, 21 bp, synthetic construct
  source 1..21: mol_type = other DNA
cagacgtatagtgatactagg

SEQ ID NO: 3417 - DNA, 21 bp, synthetic construct
  source 1..21: mol_type = other DNA
gcgatgcgtgttagtgagggg

SEQ ID NO: 3418 - DNA, 21 bp, synthetic construct
  source 1..21: mol_type = other DNA
ggcaccggcatggcagtgaag

SEQ ID NO: 3419 - DNA, 21 bp, synthetic construct
  source 1..21: mol_type = other DNA
ggcaccggcatggccgagaag

SEQ ID NO: 3420 - DNA, 21 bp, synthetic construct
  source 1..21: mol_type = other DNA
caaacaacggggggatccaga

SEQ ID NO: 3421 - DNA, 21 bp, synthetic construct
  source 1..21: mol_type = other DNA
accagcagcccacccgtggtg

SEQ ID NO: 3422 - DNA, 21 bp, synthetic construct
  source 1..21: mol_type = other DNA
aacagaaacaacagcgagaag

SEQ ID NO: 3423 - DNA, 21 bp, synthetic construct
  source 1..21: mol_type = other DNA
ggctcaatgcaaacacaaaac

SEQ ID NO: 3424 - DNA, 21 bp, synthetic construct
  source 1..21: mol_type = other DNA
caaacaacgggggatccagtc

SEQ ID NO: 3425 - DNA, 21 bp, synthetic construct
  source 1..21: mol_type = other DNA
aagacgtctagtgatactagg

SEQ ID NO: 3426 - DNA, 21 bp, synthetic construct
  source 1..21: mol_type = other DNA
aatggtcagggagtttctttt

SEQ ID NO: 3427 - DNA, 21 bp, synthetic construct
  source 1..21: mol_type = other DNA
gtgagcgacagcagaaacaga

SEQ ID NO: 3428 - DNA, 21 bp, synthetic construct
  source 1..21: mol_type = other DNA
aatggtcagggtgtatctttt

SEQ ID NO: 3429 - DNA, 21 bp, synthetic construct
  source 1..21: mol_type = other DNA
cacggcctgagcggcaaggtg

SEQ ID NO: 3430 - RNA, 21 nt, synthetic construct
  source 1..21: mol_type = other RNA
aatggtcagggtgtttctatt

SEQ ID NO: 3431 - DNA, 21 bp, synthetic construct
  source 1..21: mol_type = other DNA
gcgatgcgtcgtagtgagggg

SEQ ID NO: 3432 - DNA, 21 bp, synthetic construct
  source 1..21: mol_type = other DNA
accagcagcacccccgtggtg

SEQ ID NO: 3433 - DNA, 21 bp, synthetic construct
  source 1..21: mol_type = other DNA
ggctccatgcaaaaacaaaac

SEQ ID NO: 3434 - DNA, 21 bp, synthetic construct
  source 1..21: mol_type = other DNA
accagcagcccccacgtggtg

SEQ ID NO: 3435 - DNA, 21 bp, synthetic construct
  source 1..21: mol_type = other DNA
accagcagccccaccgtggtg

SEQ ID NO: 3436 - DNA, 21 bp, synthetic construct
  source 1..21: mol_type = other DNA
gcgatgcgtcttagtgagggc

SEQ ID NO: 3437 - DNA, 21 bp, synthetic construct
  source 1..21: mol_type = other DNA
ggcaccggcatggacgtgaag

SEQ ID NO: 3438 - DNA, 21 bp, synthetic construct
  source 1..21: mol_type = other DNA
ggcaccatgcaaacacaaaac

SEQ ID NO: 3439 - DNA, 21 bp, synthetic construct
  source 1..21: mol_type = other DNA
cccggcctgagcggcaaggag

SEQ ID NO: 3440 - DNA, 21 bp, synthetic construct
  source 1..21: mol_type = other DNA
aaaggtcagggtgtttctttt

SEQ ID NO: 3441 - DNA, 21 bp, synthetic construct
  source 1..21: mol_type = other DNA
aagatgaagactgagacgggg

SEQ ID NO: 3442 - DNA, 21 bp, synthetic construct
  source 1..21: mol_type = other DNA
atgaagaagactgagacgggg

SEQ ID NO: 3443 - DNA, 21 bp, synthetic construct
  source 1..21: mol_type = other DNA
accatcagccacagcagcagc

SEQ ID NO: 3444 - DNA, 21 bp, synthetic construct
  source 1..21: mol_type = other DNA
gtgagcgacagaagcaacaga

SEQ ID NO: 3445 - DNA, 21 bp, synthetic construct
  source 1..21: mol_type = other DNA
agcggcagaaacaacagcgag

SEQ ID NO: 3446 - DNA, 21 bp, synthetic construct
  source 1..21: mol_type = other DNA
cacaacctgcagcagagccag

SEQ ID NO: 3447 - DNA, 21 bp, synthetic construct
  source 1..21: mol_type = other DNA
ggcatgcaagacgtacgcata

SEQ ID NO: 3448 - DNA, 21 bp, synthetic construct
  source 1..21: mol_type = other DNA
ggcaccggcaaggccgtgaag

SEQ ID NO: 3449 - DNA, 21 bp, synthetic construct
  source 1..21: mol_type = other DNA
caaataaaacagatcgaacgg

SEQ ID NO: 3450 - DNA, 21 bp, synthetic construct
  source 1..21: mol_type = other DNA
gccagcacaggcatcaagctg

SEQ ID NO: 3451 - DNA, 21 bp, synthetic construct
  source 1..21: mol_type = other DNA
gcgatgcgtcttagtgagcgg

SEQ ID NO: 3452 - DNA, 21 bp, synthetic construct
  source 1..21: mol_type = other DNA
ggcaccggcatggccatgaag

SEQ ID NO: 3453 - DNA, 21 bp, synthetic construct
  source 1..21: mol_type = other DNA
ggctccatgcaaacacaaaaa

SEQ ID NO: 3454 - DNA, 21 bp, synthetic construct
  source 1..21: mol_type = other DNA
cagacgtctactgatactagg

SEQ ID NO: 3455 - DNA, 21 bp, synthetic construct
  source 1..21: mol_type = other DNA
ccttatgatagtcatacgagt

SEQ ID NO: 3456 - DNA, 21 bp, synthetic construct
  source 1..21: mol_type = other DNA
aatggtcagggtgattctttt

SEQ ID NO: 3457 - DNA, 21 bp, synthetic construct
  source 1..21: mol_type = other DNA
atgatgaagacagagacgggg

SEQ ID NO: 3458 - DNA, 21 bp, synthetic construct
  source 1..21: mol_type = other DNA
ggggtggttaatgatgatcgg

SEQ ID NO: 3459 - RNA, 21 nt, synthetic construct
  source 1..21: mol_type = other RNA
cagacgtctagtgattctagg

SEQ ID NO: 3460 - DNA, 21 bp, synthetic construct
  source 1..21: mol_type = other DNA
accagcagccccccccgtggt

SEQ ID NO: 3461 - DNA, 21 bp, synthetic construct
  source 1..21: mol_type = other DNA
aatggtcagggtgtttcttta

SEQ ID NO: 3462 - DNA, 21 bp, synthetic construct
  source 1..21: mol_type = other DNA
caaacaacggggggatacagt

SEQ ID NO: 3463 - DNA, 21 bp, synthetic construct
  source 1..21: mol_type = other DNA
cagacgtctagtgatactggg

SEQ ID NO: 3464 - DNA, 21 bp, synthetic construct
  source 1..21: mol_type = other DNA
atcgggcaaggagtgagcgag

SEQ ID NO: 3465 - DNA, 21 bp, synthetic construct
  source 1..21: mol_type = other DNA
aatggtcagggtgtttatttt

SEQ ID NO: 3466 - DNA, 21 bp, synthetic construct
  source 1..21: mol_type = other DNA
agaagcgacgtggtgagagac

SEQ ID NO: 3467 - DNA, 21 bp, synthetic construct
  source 1..21: mol_type = other DNA
atcgggcaaggagagagcgtg

SEQ ID NO: 3468 - DNA, 21 bp, synthetic construct
  source 1..21: mol_type = other DNA
aacagaaaaaccagcgagaag

SEQ ID NO: 3469 - DNA, 21 bp, synthetic construct
  source 1..21: mol_type = other DNA
aatggacagggtgtttctttt

SEQ ID NO: 3470 - DNA, 21 bp, synthetic construct
  source 1..21: mol_type = other DNA
gcgatgcgtcttagtgagtgg

SEQ ID NO: 3471 - DNA, 21 bp, synthetic construct
  source 1..21: mol_type = other DNA
gtcttacaacaaggacacgtt

SEQ ID NO: 3472 - DNA, 21 bp, synthetic construct
  source 1..21: mol_type = other DNA
aatggtcagggtgtttcattt

SEQ ID NO: 3473 - DNA, 21 bp, synthetic construct
  source 1..21: mol_type = other DNA
agaagcgacgaggtgagcgac

SEQ ID NO: 3474 - DNA, 21 bp, synthetic construct
  source 1..21: mol_type = other DNA
accagcagaccccccgtggtg

SEQ ID NO: 3475 - DNA, 21 bp, synthetic construct
  source 1..21: mol_type = other DNA
gtcttccaacaaggacacgta

SEQ ID NO: 3476 - DNA, 21 bp, synthetic construct
  source 1..21: mol_type = other DNA
cagatcagaggcaccgagaag

SEQ ID NO: 3477 - DNA, 21 bp, synthetic construct
  source 1..21: mol_type = other DNA
gcgatgcgtcttagtgaggtg

SEQ ID NO: 3478 - DNA, 21 bp, synthetic construct
  source 1..21: mol_type = other DNA
gtcttcaaacaaggacacgtt

SEQ ID NO: 3479 - DNA, 21 bp, synthetic construct
  source 1..21: mol_type = other DNA
cagacatctagtgatactagg

SEQ ID NO: 3480 - DNA, 21 bp, synthetic construct
  source 1..21: mol_type = other DNA
gttgcacgtgaggagcatatg

SEQ ID NO: 3481 - DNA, 21 bp, synthetic construct
  source 1..21: mol_type = other DNA
gccagcaccggcatcaagcag

SEQ ID NO: 3482 - DNA, 21 bp, synthetic construct
  source 1..21: mol_type = other DNA
aatggtaagggtgtttctttt

SEQ ID NO: 3483 - DNA, 21 bp, synthetic construct
  source 1..21: mol_type = other DNA
accagcagcccccccttggtg

SEQ ID NO: 3484 - DNA, 21 bp, synthetic construct
  source 1..21: mol_type = other DNA
caaacaacggggggaaccagt

SEQ ID NO: 3485 - DNA, 21 bp, synthetic construct
  source 1..21: mol_type = other DNA
cagccgtctagtgatactagg

SEQ ID NO: 3486 - DNA, 21 bp, synthetic construct
  source 1..21: mol_type = other DNA
caaacaacggggggatcaagt

SEQ ID NO: 3487 - DNA, 21 bp, synthetic construct
  source 1..21: mol_type = other DNA
cagataagaggcaccgagatg

SEQ ID NO: 3488 - DNA, 21 bp, synthetic construct
  source 1..21: mol_type = other DNA
ggcatgaaagacgtacgcatc

SEQ ID NO: 3489 - DNA, 21 bp, synthetic construct
  source 1..21: mol_type = other DNA
cagacgtctagtggtactagg

SEQ ID NO: 3490 - DNA, 21 bp, synthetic construct
  source 1..21: mol_type = other DNA
gttggtcgtgaggagcatatg

SEQ ID NO: 3491 - DNA, 21 bp, synthetic construct
  source 1..21: mol_type = other DNA
gcgatgcgtcttagtgggggg

SEQ ID NO: 3492 - DNA, 21 bp, synthetic construct
  source 1..21: mol_type = other DNA
atgatgaagactgagaagggg

SEQ ID NO: 3493 - DNA, 21 bp, synthetic construct
  source 1..21: mol_type = other DNA
gcgatgcgtcttagtgaggcg

SEQ ID NO: 3494 - DNA, 21 bp, synthetic construct
  source 1..21: mol_type = other DNA
gacagcaccggcatcaagctg

SEQ ID NO: 3495 - DNA, 21 bp, synthetic construct
  source 1..21: mol_type = other DNA
cagacgtctggtgatactagg

SEQ ID NO: 3496 - DNA, 21 bp, synthetic construct
  source 1..21: mol_type = other DNA
cggacgtctagtgatactagg

SEQ ID NO: 3497 - DNA, 21 bp, synthetic construct
  source 1..21: mol_type = other DNA
gtcaaaatatacggcgacctg

SEQ ID NO: 3498 - DNA, 21 bp, synthetic construct
  source 1..21: mol_type = other DNA
acaagcagcccccccgtggtg

SEQ ID NO: 3499 - DNA, 21 bp, synthetic construct
  source 1..21: mol_type = other DNA
ggctccatgcaaacaaaaaac

SEQ ID NO: 3500 - DNA, 21 bp, synthetic construct
  source 1..21: mol_type = other DNA
cagatgtctagtgatactagg

SEQ ID NO: 3501 - DNA, 21 bp, synthetic construct
  source 1..21: mol_type = other DNA
gcggtgcgtcttagtgagggg

SEQ ID NO: 3502 - DNA, 21 bp, synthetic construct
  source 1..21: mol_type = other DNA
ggcatgcaagacgtacgcaac

SEQ ID NO: 3503 - DNA, 21 bp, synthetic construct
  source 1..21: mol_type = other DNA
accagaagcccccccgtggtg

SEQ ID NO: 3504 - DNA, 21 bp, synthetic construct
  source 1..21: mol_type = other DNA
aaaagaaacaccagcgagaag

SEQ ID NO: 3505 - RNA, 21 nt, synthetic construct
  source 1..21: mol_type = other RNA
ggggtggataatgctgatcgg

SEQ ID NO: 3506 - DNA, 21 bp, synthetic construct
  source 1..21: mol_type = other DNA
ggcatgcaagacgaacgcatc

SEQ ID NO: 3507 - DNA, 21 bp, synthetic construct
  source 1..21: mol_type = other DNA
cagacgtccagtgatactagg

SEQ ID NO: 3508 - DNA, 21 bp, synthetic construct
  source 1..21: mol_type = other DNA
caggcgtctagtgatactagg

SEQ ID NO: 3509 - DNA, 21 bp, synthetic construct
  source 1..21: mol_type = other DNA
gcgatgcggcttagtgagggg

SEQ ID NO: 3510 - DNA, 21 bp, synthetic construct
  source 1..21: mol_type = other DNA
gtcaaaatatacggcgcccag

SEQ ID NO: 3511 - DNA, 21 bp, synthetic construct
  source 1..21: mol_type = other DNA
gcgatgggtcttagtgagggg

SEQ ID NO: 3512 - DNA, 21 bp, synthetic construct
  source 1..21: mol_type = other DNA
ggcatgcaagacgtaagcatc

SEQ ID NO: 3513 - DNA, 21 bp, synthetic construct
  source 1..21: mol_type = other DNA
gcgatgcgtcttagtgatggg

SEQ ID NO: 3514 - DNA, 21 bp, synthetic construct
  source 1..21: mol_type = other DNA
gacgtgaagagcgacacacag

SEQ ID NO: 3515 - DNA, 21 bp, synthetic construct
  source 1..21: mol_type = other DNA
ggctccatgcaaacacaaacc

SEQ ID NO: 3516 - DNA, 21 bp, synthetic construct
  source 1..21: mol_type = other DNA
gacaaaatatacggcgccctg

SEQ ID NO: 3517 - DNA, 21 bp, synthetic construct
  source 1..21: mol_type = other DNA
agaagcgacgtggagagcgac

SEQ ID NO: 3518 - DNA, 21 bp, synthetic construct
  source 1..21: mol_type = other DNA
ggcacaggcatggccgtgaag

SEQ ID NO: 3519 - DNA, 21 bp, synthetic construct
  source 1..21: mol_type = other DNA
gtcaaaatatacggcgcactg

SEQ ID NO: 3520 - DNA, 21 bp, synthetic construct
  source 1..21: mol_type = other DNA
caaataaaaccgatagaacgg

SEQ ID NO: 3521 - DNA, 21 bp, synthetic construct
  source 1..21: mol_type = other DNA
cagacgtctagcgatactagg

SEQ ID NO: 3522 - DNA, 21 bp, synthetic construct
  source 1..21: mol_type = other DNA
ggggaggttaatgctgatcgg

SEQ ID NO: 3523 - DNA, 21 bp, synthetic construct
  source 1..21: mol_type = other DNA
cagacgtctagtgatactagt

SEQ ID NO: 3524 - DNA, 21 bp, synthetic construct
  source 1..21: mol_type = other DNA
gcgatgcgtcttagtgagggt

SEQ ID NO: 3525 - DNA, 21 bp, synthetic construct
  source 1..21: mol_type = other DNA
ggcagcaagctggccacccac

SEQ ID NO: 3526 - DNA, 21 bp, synthetic construct
  source 1..21: mol_type = other DNA
ataggggacatgggcggtctg

SEQ ID NO: 3527 - DNA, 21 bp, synthetic construct
  source 1..21: mol_type = other DNA
aatggtcagggtgttactttt

SEQ ID NO: 3528 - DNA, 21 bp, synthetic construct
  source 1..21: mol_type = other DNA
ggcaagcaagacgtacgcatc

SEQ ID NO: 3529 - RNA, 21 nt, synthetic construct
  source 1..21: mol_type = other RNA
cctacgcggggtgagaaagag

SEQ ID NO: 3530 - DNA, 21 bp, synthetic construct
  source 1..21: mol_type = other DNA
cagacctctagtgatactagg

SEQ ID NO: 3531 - DNA, 21 bp, synthetic construct
  source 1..21: mol_type = other DNA
cagacgtctagtgataccagg

SEQ ID NO: 3532 - DNA, 21 bp, synthetic construct
  source 1..21: mol_type = other DNA
aaagccatcgacggcatcgag

SEQ ID NO: 3533 - RNA, 21 nt, synthetic construct
  source 1..21: mol_type = other RNA
cagacgtctagtgatgctagg

SEQ ID NO: 3534 - DNA, 21 bp, synthetic construct
  source 1..21: mol_type = other DNA
atcagaaacaccagcgagaag

SEQ ID NO: 3535 - DNA, 21 bp, synthetic construct
  source 1..21: mol_type = other DNA
ggcagcaagctggccacaccc

SEQ ID NO: 3536 - DNA, 21 bp, synthetic construct
  source 1..21: mol_type = other DNA
ggcatgcaagaagtacgcatc

SEQ ID NO: 3537 - DNA, 21 bp, synthetic construct
  source 1..21: mol_type = other DNA
aacagagacaccagcgagaag

SEQ ID NO: 3538 - DNA, 21 bp, synthetic construct
  source 1..21: mol_type = other DNA
cagatcagaggaaccgagatg

SEQ ID NO: 3539 - RNA, 21 nt, synthetic construct
  source 1..21: mol_type = other RNA
gccagaaccggcatcaagctg

SEQ ID NO: 3540 - DNA, 21 bp, synthetic construct
  source 1..21: mol_type = other DNA
cagacgtctagtgatacttgg

SEQ ID NO: 3541 - DNA, 21 bp, synthetic construct
  source 1..21: mol_type = other DNA
agacacgagcacagcaaggac

SEQ ID NO: 3542 - DNA, 21 bp, synthetic construct
  source 1..21: mol_type = other DNA
gcgatgcgtcttagtcagggg

SEQ ID NO: 3543 - RNA, 21 nt, synthetic construct
  source 1..21: mol_type = other RNA
agaagagacgtggtgagcgac

SEQ ID NO: 3544 - DNA, 21 bp, synthetic construct
  source 1..21: mol_type = other DNA
aacagttacgttgtcaaatct

SEQ ID NO: 3545 - DNA, 21 bp, synthetic construct
  source 1..21: mol_type = other DNA
gcgatgcgtctttgtgagggg

SEQ ID NO: 3546 - DNA, 21 bp, synthetic construct
  source 1..21: mol_type = other DNA
tatggtcagggtgtttctttt

SEQ ID NO: 3547 - DNA, 21 bp, synthetic construct
  source 1..21: mol_type = other DNA
gagactgctacgaagagtaat

SEQ ID NO: 3548 - DNA, 21 bp, synthetic construct
  source 1..21: mol_type = other DNA
ggggtggttaatgctgaacgg

SEQ ID NO: 3549 - DNA, 21 bp, synthetic construct
  source 1..21: mol_type = other DNA
ataggggcaatgggcggtctg

SEQ ID NO: 3550 - DNA, 21 bp, synthetic construct
  source 1..21: mol_type = other DNA
aacagaagcaccagcgagaag

SEQ ID NO: 3551 - DNA, 21 bp, synthetic construct
  source 1..21: mol_type = other DNA
gcgatgcgtctgagtgagggg

SEQ ID NO: 3552 - DNA, 21 bp, synthetic construct
  source 1..21: mol_type = other DNA
cagacgtctagtgacactagg

SEQ ID NO: 3553 - DNA, 21 bp, synthetic construct
  source 1..21: mol_type = other DNA
cagacgtctagtgttactagg

SEQ ID NO: 3554 - DNA, 21 bp, synthetic construct
  source 1..21: mol_type = other DNA
cagacgtctagtgatactagc

SEQ ID NO: 3555 - DNA, 21 bp, synthetic construct
  source 1..21: mol_type = other DNA
ccgaataatcttcatagttat

SEQ ID NO: 3556 - DNA, 21 bp, synthetic construct
  source 1..21: mol_type = other DNA
cccggcctgagaggcaaggtg

SEQ ID NO: 3557 - DNA, 21 bp, synthetic construct
  source 1..21: mol_type = other DNA
gcccggaacgatacagaaggg

SEQ ID NO: 3558 - DNA, 21 bp, synthetic construct
  source 1..21: mol_type = other DNA
cagacgtcttgtgatactagg

SEQ ID NO: 3559 - DNA, 21 bp, synthetic construct
  source 1..21: mol_type = other DNA
gtcatccaacaaggacacgtt

SEQ ID NO: 3560 - DNA, 21 bp, synthetic construct
  source 1..21: mol_type = other DNA
cccggactgagcggcaaggtg

SEQ ID NO: 3561 - DNA, 21 bp, synthetic construct
  source 1..21: mol_type = other DNA
cagacgtctagtgatactaga

SEQ ID NO: 3562 - DNA, 21 bp, synthetic construct
  source 1..21: mol_type = other DNA
ggcagacacaacgagcccccc

SEQ ID NO: 3563 - DNA, 21 bp, synthetic construct
  source 1..21: mol_type = other DNA
cagacgtctagtcatactagg

SEQ ID NO: 3564 - DNA, 21 bp, synthetic construct
  source 1..21: mol_type = other DNA
gcgatgcatcttagtgagggg

SEQ ID NO: 3565 - DNA, 21 bp, synthetic construct
  source 1..21: mol_type = other DNA
atgatgaagactgagacgggc

SEQ ID NO: 3566 - DNA, 21 bp, synthetic construct
  source 1..21: mol_type = other DNA
gtctaccaacaaggacacgtt

SEQ ID NO: 3567 - DNA, 21 bp, synthetic construct
  source 1..21: mol_type = other DNA
gacttccaacaaggacacgtt

SEQ ID NO: 3568 - DNA, 21 bp, synthetic construct
  source 1..21: mol_type = other DNA
ggatccatgcaaacacaaaac

SEQ ID NO: 3569 - DNA, 21 bp, synthetic construct
  source 1..21: mol_type = other DNA
ggcaacggcatggccgtgaag

SEQ ID NO: 3570 - DNA, 21 bp, synthetic construct
  source 1..21: mol_type = other DNA
aacgggcaaggagtgagcgtg

SEQ ID NO: 3571 - DNA, 21 bp, synthetic construct
  source 1..21: mol_type = other DNA
ggtgagtctggtagggatcag

SEQ ID NO: 3572 - DNA, 21 bp, synthetic construct
  source 1..21: mol_type = other DNA
gccaggaacgttacagaaggg

SEQ ID NO: 3573 - DNA, 21 bp, synthetic construct
  source 1..21: mol_type = other DNA
ataggggccaagggcggtctg

SEQ ID NO: 3574 - DNA, 21 bp, synthetic construct
  source 1..21: mol_type = other DNA
atcgggcaaggagtgagagtg

SEQ ID NO: 3575 - DNA, 21 bp, synthetic construct
  source 1..21: mol_type = other DNA
gtcaaaatatacggcgccatg

SEQ ID NO: 3576 - DNA, 21 bp, synthetic construct
  source 1..21: mol_type = other DNA
ggcagacacaacgagacccac

SEQ ID NO: 3577 - DNA, 21 bp, synthetic construct
  source 1..21: mol_type = other DNA
gagggcagcgtgagaatggac

SEQ ID NO: 3578 - DNA, 21 bp, synthetic construct
  source 1..21: mol_type = other DNA
ggggtggttaaagctgatcgg

SEQ ID NO: 3579 - DNA, 21 bp, synthetic construct
  source 1..21: mol_type = other DNA
cagacgcctagtgatactagg

SEQ ID NO: 3580 - DNA, 21 bp, synthetic construct
  source 1..21: mol_type = other DNA
gcgttgcgtcttagtgagggg

SEQ ID NO: 3581 - DNA, 21 bp, synthetic construct
  source 1..21: mol_type = other DNA
aacagaaacgccagcgagaag

SEQ ID NO: 3582 - DNA, 21 bp, synthetic construct
  source 1..21: mol_type = other DNA
ataggggccatgggcggtcag

SEQ ID NO: 3583 - DNA, 21 bp, synthetic construct
  source 1..21: mol_type = other DNA
gggtgtctgactcagactcat

SEQ ID NO: 3584 - DNA, 21 bp, synthetic construct
  source 1..21: mol_type = other DNA
ataggggccatgggcggactg

SEQ ID NO: 3585 - DNA, 21 bp, synthetic construct
  source 1..21: mol_type = other DNA
cctacgcggggagagaatgag

SEQ ID NO: 3586 - DNA, 21 bp, synthetic construct
  source 1..21: mol_type = other DNA
cagatcagaggcaacgagatg

SEQ ID NO: 3587 - DNA, 21 bp, synthetic construct
  source 1..21: mol_type = other DNA
gggagtctgactcagactcaa

SEQ ID NO: 3588 - DNA, 21 bp, synthetic construct
  source 1..21: mol_type = other DNA
gcgatgcgtcttagtgaggag

SEQ ID NO: 3589 - DNA, 21 bp, synthetic construct
  source 1..21: mol_type = other DNA
ggctccatccaaacacaaaac

SEQ ID NO: 3590 - DNA, 21 bp, synthetic construct
  source 1..21: mol_type = other DNA
ggcaccggaatggccgtgaag

SEQ ID NO: 3591 - RNA, 21 nt, synthetic construct
  source 1..21: mol_type = other RNA
catacgcggggtgagaatgag

SEQ ID NO: 3592 - DNA, 21 bp, synthetic construct
  source 1..21: mol_type = other DNA
ggggtggttaatgctgatagg

SEQ ID NO: 3593 - DNA, 21 bp, synthetic construct
  source 1..21: mol_type = other DNA
ggctacgacctgaccggcaac

SEQ ID NO: 3594 - DNA, 21 bp, synthetic construct
  source 1..21: mol_type = other DNA
ggctccatgcaagcacaaaac

SEQ ID NO: 3595 - DNA, 21 bp, synthetic construct
  source 1..21: mol_type = other DNA
cagacgtctagtgatactacg

SEQ ID NO: 3596 - DNA, 21 bp, synthetic construct
  source 1..21: mol_type = other DNA
cagacgtctagttatactagg

SEQ ID NO: 3597 - DNA, 21 bp, synthetic construct
  source 1..21: mol_type = other DNA
gcgatgcgtcttagtgacggg

SEQ ID NO: 3598 - DNA, 21 bp, synthetic construct
  source 1..21: mol_type = other DNA
aacagaaacaccagcgagagg

SEQ ID NO: 3599 - DNA, 21 bp, synthetic construct
  source 1..21: mol_type = other DNA
agcgagagaagacaggaggac

SEQ ID NO: 3600 - DNA, 21 bp, synthetic construct
  source 1..21: mol_type = other DNA
attggtcagggtgtttctttt

SEQ ID NO: 3601 - DNA, 21 bp, synthetic construct
  source 1..21: mol_type = other DNA
ggggtggttaatgcagatcgg

SEQ ID NO: 3602 - DNA, 21 bp, synthetic construct
  source 1..21: mol_type = other DNA
tagacgtctagtgatactagg

SEQ ID NO: 3603 - DNA, 21 bp, synthetic construct
  source 1..21: mol_type = other DNA
ggcaccgacatggccgtgaag

SEQ ID NO: 3604 - DNA, 21 bp, synthetic construct
  source 1..21: mol_type = other DNA
gggagtctgactcagacacat

SEQ ID NO: 3605 - DNA, 21 bp, synthetic construct
  source 1..21: mol_type = other DNA
gggatgcgtcttagtgagggg

SEQ ID NO: 3606 - DNA, 21 bp, synthetic construct
  source 1..21: mol_type = other DNA
aacagaaactccagcgagaag

SEQ ID NO: 3607 - DNA, 21 bp, synthetic construct
  source 1..21: mol_type = other DNA
gtcaaaatatacggagccctg

SEQ ID NO: 3608 - RNA, 21 nt, synthetic construct
  source 1..21: mol_type = other RNA
atgatgaagaatgagacgggg

SEQ ID NO: 3609 - DNA, 21 bp, synthetic construct
  source 1..21: mol_type = other DNA
cctacgaggggtgagaatgag

SEQ ID NO: 3610 - DNA, 21 bp, synthetic construct
  source 1..21: mol_type = other DNA
gttgctcgtgaggagcatatt

SEQ ID NO: 3611 - RNA, 21 nt, synthetic construct
  source 1..21: mol_type = other RNA
gcgacgcgtcttagtgagggg

SEQ ID NO: 3612 - DNA, 21 bp, synthetic construct
  source 1..21: mol_type = other DNA
gctatgcgtcttagtgagggg

SEQ ID NO: 3613 - DNA, 21 bp, synthetic construct
  source 1..21: mol_type = other DNA
aacggaaacaccagcgagaag

SEQ ID NO: 3614 - DNA, 21 bp, synthetic construct
  source 1..21: mol_type = other DNA
gagagaagcggtctgggcatg

SEQ ID NO: 3615 - DNA, 21 bp, synthetic construct
  source 1..21: mol_type = other DNA
gcgatgtgtcttagtgagggg

SEQ ID NO: 3616 - DNA, 21 bp, synthetic construct
  source 1..21: mol_type = other DNA
agaaaccagaacaacagacag

SEQ ID NO: 3617 - DNA, 21 bp, synthetic construct
  source 1..21: mol_type = other DNA
cagacgtctagtgatactatg

SEQ ID NO: 3618 - DNA, 21 bp, synthetic construct
  source 1..21: mol_type = other DNA
gtgggcagcgtgagaaaggac

SEQ ID NO: 3619 - DNA, 21 bp, synthetic construct
  source 1..21: mol_type = other DNA
gcgatgcgtcttactgagggg

SEQ ID NO: 3620 - DNA, 21 bp, synthetic construct
  source 1..21: mol_type = other DNA
gcgatgcgtcttggtgagggg

SEQ ID NO: 3621 - DNA, 21 bp, synthetic construct
  source 1..21: mol_type = other DNA
cacacgtctagtgatactagg

SEQ ID NO: 3622 - RNA, 21 nt, synthetic construct
  source 1..21: mol_type = other RNA
gcgaggcgtcttagtgagggg

SEQ ID NO: 3623 - DNA, 21 bp, synthetic construct
  source 1..21: mol_type = other DNA
gccagcaccggcaacaagctg

SEQ ID NO: 3624 - DNA, 21 bp, synthetic construct
  source 1..21: mol_type = other DNA
caaacaaaggggggatccagt

SEQ ID NO: 3625 - DNA, 21 bp, synthetic construct
  source 1..21: mol_type = other DNA
ataggggccatgggaggtctg

SEQ ID NO: 3626 - DNA, 21 bp, synthetic construct
  source 1..21: mol_type = other DNA
gttgctcgtcaggagcatatg

SEQ ID NO: 3627 - DNA, 21 bp, synthetic construct
  source 1..21: mol_type = other DNA
caaataaaaccgaacgaacgg

SEQ ID NO: 3628 - RNA, 21 nt, synthetic construct
  source 1..21: mol_type = other RNA
atgattaatcgtgatactact

SEQ ID NO: 3629 - DNA, 21 bp, synthetic construct
  source 1..21: mol_type = other DNA
ggcataatgagaaccaaaaac

SEQ ID NO: 3630 - DNA, 21 bp, synthetic construct
  source 1..21: mol_type = other DNA
aacagaaacaccggcgagaag

SEQ ID NO: 3631 - DNA, 21 bp, synthetic construct
  source 1..21: mol_type = other DNA
gtcttccaacaaggaaacgtt

SEQ ID NO: 3632 - DNA, 21 bp, synthetic construct
  source 1..21: mol_type = other DNA
atcgggaaaggagtgagcgtg

SEQ ID NO: 3633 - DNA, 21 bp, synthetic construct
  source 1..21: mol_type = other DNA
gcgatgcgtcttagtgtgggg

SEQ ID NO: 3634 - DNA, 21 bp, synthetic construct
  source 1..21: mol_type = other DNA
aaatcgacaccttcaaagtcc

SEQ ID NO: 3635 - DNA, 21 bp, synthetic construct
  source 1..21: mol_type = other DNA
gtcaaaataaacggcgccctg

SEQ ID NO: 3636 - DNA, 21 bp, synthetic construct
  source 1..21: mol_type = other DNA
gggagtctgactcagactaat

SEQ ID NO: 3637 - DNA, 21 bp, synthetic construct
  source 1..21: mol_type = other DNA
aacagaaccaccagcgagaag

SEQ ID NO: 3638 - DNA, 21 bp, synthetic construct
  source 1..21: mol_type = other DNA
accatcagcaacgtcaccaac

SEQ ID NO: 3639 - DNA, 21 bp, synthetic construct
  source 1..21: mol_type = other DNA
gcgattcgtcttagtgagggg

SEQ ID NO: 3640 - DNA, 21 bp, synthetic construct
  source 1..21: mol_type = other DNA
ggcataatgagaacacaaaac

SEQ ID NO: 3641 - DNA, 21 bp, synthetic construct
  source 1..21: mol_type = other DNA
gacagaaacaccagcgagaag

SEQ ID NO: 3642 - DNA, 21 bp, synthetic construct
  source 1..21: mol_type = other DNA
gcgatgcgtctcagtgagggg

SEQ ID NO: 3643 - DNA, 21 bp, synthetic construct
  source 1..21: mol_type = other DNA
gggagtcagactcagactcat

SEQ ID NO: 3644 - DNA, 21 bp, synthetic construct
  source 1..21: mol_type = other DNA
aacacaaacaccagcgagaag

SEQ ID NO: 3645 - DNA, 21 bp, synthetic construct
  source 1..21: mol_type = other DNA
cagaacagaggcaccgagatg

SEQ ID NO: 3646 - DNA, 21 bp, synthetic construct
  source 1..21: mol_type = other DNA
ggaaccggcatggccgtgaag

SEQ ID NO: 3647 - DNA, 21 bp, synthetic construct
  source 1..21: mol_type = other DNA
agacacgtgaacagcaaggac

SEQ ID NO: 3648 - DNA, 21 bp, synthetic construct
  source 1..21: mol_type = other DNA
cccgacctgagcggcaaggtg

SEQ ID NO: 3649 - DNA, 21 bp, synthetic construct
  source 1..21: mol_type = other DNA
gccagcaccggcataaagctg

SEQ ID NO: 3650 - DNA, 21 bp, synthetic construct
  source 1..21: mol_type = other DNA
aacagaaacaccaccgagaag

SEQ ID NO: 3651 - DNA, 21 bp, synthetic construct
  source 1..21: mol_type = other DNA
gcaagcaccggcatcaagctg

SEQ ID NO: 3652 - DNA, 21 bp, synthetic construct
  source 1..21: mol_type = other DNA
agcggcagaaacaacagagtg

SEQ ID NO: 3653 - DNA, 21 bp, synthetic construct
  source 1..21: mol_type = other DNA
aacagcagcccccccgtggtg

SEQ ID NO: 3654 - DNA, 21 bp, synthetic construct
  source 1..21: mol_type = other DNA
ggcagcaagctggacaccccc

SEQ ID NO: 3655 - DNA, 21 bp, synthetic construct
  source 1..21: mol_type = other DNA
aacagttcagttgtcaaatct

SEQ ID NO: 3656 - DNA, 21 bp, synthetic construct
  source 1..21: mol_type = other DNA
aacagaaacaccagcgtgaag

SEQ ID NO: 3657 - DNA, 21 bp, synthetic construct
  source 1..21: mol_type = other DNA
accatcagcaccagcagcagc

SEQ ID NO: 3658 - DNA, 21 bp, synthetic construct
  source 1..21: mol_type = other DNA
ggcaccggcatcgccgtgaag

SEQ ID NO: 3659 - DNA, 21 bp, synthetic construct
  source 1..21: mol_type = other DNA
gccagcaacggcatcaagctg

SEQ ID NO: 3660 - DNA, 21 bp, synthetic construct
  source 1..21: mol_type = other DNA
gtcttccaacaaggacaagtt

SEQ ID NO: 3661 - DNA, 21 bp, synthetic construct
  source 1..21: mol_type = other DNA
gcctccatgcaaacacaaaac

SEQ ID NO: 3662 - DNA, 21 bp, synthetic construct
  source 1..21: mol_type = other DNA
ggagtgtctggtagggatcag

SEQ ID NO: 3663 - DNA, 21 bp, synthetic construct
  source 1..21: mol_type = other DNA
cagacttctagtgatactagg

SEQ ID NO: 3664 - DNA, 21 bp, synthetic construct
  source 1..21: mol_type = other DNA
aagattaatcgtgctactact

SEQ ID NO: 3665 - DNA, 21 bp, synthetic construct
  source 1..21: mol_type = other DNA
aacaggaacaccagcgagaag

SEQ ID NO: 3666 - DNA, 21 bp, synthetic construct
  source 1..21: mol_type = other DNA
ggggtggtaaatgctgatcgg

SEQ ID NO: 3667 - DNA, 21 bp, synthetic construct
  source 1..21: mol_type = other DNA
agagagagcagacaggaggac

SEQ ID NO: 3668 - DNA, 21 bp, synthetic construct
  source 1..21: mol_type = other DNA
ccgaataatcttcatagatct

SEQ ID NO: 3669 - DNA, 21 bp, synthetic construct
  source 1..21: mol_type = other DNA
gcgatgcgtcttagttagggg

SEQ ID NO: 3670 - DNA, 21 bp, synthetic construct
  source 1..21: mol_type = other DNA
gtgagcgaaagcagcaacaga

SEQ ID NO: 3671 - DNA, 21 bp, synthetic construct
  source 1..21: mol_type = other DNA
caaataaaaacgatcgaacgg

SEQ ID NO: 3672 - DNA, 21 bp, synthetic construct
  source 1..21: mol_type = other DNA
aaagacatcgacggcatcgtg

SEQ ID NO: 3673 - DNA, 21 bp, synthetic construct
  source 1..21: mol_type = other DNA
aaggtggagttaaacagagtg

SEQ ID NO: 3674 - DNA, 21 bp, synthetic construct
  source 1..21: mol_type = other DNA
agacacgtgcacagaaaggac

SEQ ID NO: 3675 - DNA, 21 bp, synthetic construct
  source 1..21: mol_type = other DNA
accatcagccacgtcacaaac

SEQ ID NO: 3676 - DNA, 21 bp, synthetic construct
  source 1..21: mol_type = other DNA
gagacgtctagtgatactagg

SEQ ID NO: 3677 - DNA, 21 bp, synthetic construct
  source 1..21: mol_type = other DNA
aacagatccgttgtcaaatct

SEQ ID NO: 3678 - DNA, 21 bp, synthetic construct
  source 1..21: mol_type = other DNA
aacagaaacaccagcaagaag

SEQ ID NO: 3679 - DNA, 21 bp, synthetic construct
  source 1..21: mol_type = other DNA
agcagaaacaccagcgagaag

SEQ ID NO: 3680 - DNA, 21 bp, synthetic construct
  source 1..21: mol_type = other DNA
accagcagcccccccttgttg

SEQ ID NO: 3681 - DNA, 21 bp, synthetic construct
  source 1..21: mol_type = other DNA
cagacgtctagtaatactagg

SEQ ID NO: 3682 - DNA, 21 bp, synthetic construct
  source 1..21: mol_type = other DNA
aacagaaacacaagagagaag

SEQ ID NO: 3683 - DNA, 21 bp, synthetic construct
  source 1..21: mol_type = other DNA
aatggtcagggtgtttctttc

SEQ ID NO: 3684 - DNA, 21 bp, synthetic construct
  source 1..21: mol_type = other DNA
ggctccatgcaaacacaaagc

SEQ ID NO: 3685 - DNA, 21 bp, synthetic construct
  source 1..21: mol_type = other DNA
atagggcaaggagtgagcgtg

SEQ ID NO: 3686 - DNA, 21 bp, synthetic construct
  source 1..21: mol_type = other DNA
gttgctcgtgatgagcatatg

SEQ ID NO: 3687 - DNA, 21 bp, synthetic construct
  source 1..21: mol_type = other DNA
cagatcagaggcgccgagatg

SEQ ID NO: 3688 - DNA, 21 bp, synthetic construct
  source 1..21: mol_type = other DNA
ggcagacacaacgagacccca

SEQ ID NO: 3689 - DNA, 21 bp, synthetic construct
  source 1..21: mol_type = other DNA
tatcagggggctgagtcgagt

SEQ ID NO: 3690 - DNA, 21 bp, synthetic construct
  source 1..21: mol_type = other DNA
cccggccagagcggcaaggtg

SEQ ID NO: 3691 - DNA, 21 bp, synthetic construct
  source 1..21: mol_type = other DNA
gttgctcgtgaggggcatatg

SEQ ID NO: 3692 - DNA, 21 bp, synthetic construct
  source 1..21: mol_type = other DNA
cgctccatgcaaacacaaaac

SEQ ID NO: 3693 - RNA, 21 nt, synthetic construct
  source 1..21: mol_type = other RNA
gggagtctgactaagactcat

SEQ ID NO: 3694 - DNA, 21 bp, synthetic construct
  source 1..21: mol_type = other DNA
ccttatgatagtactacgagt

SEQ ID NO: 3695 - DNA, 21 bp, synthetic construct
  source 1..21: mol_type = other DNA
gcgatgcgtcttagcgagggg

SEQ ID NO: 3696 - DNA, 21 bp, synthetic construct
  source 1..21: mol_type = other DNA
cacgtggtggccgtgggcgag

SEQ ID NO: 3697 - DNA, 21 bp, synthetic construct
  source 1..21: mol_type = other DNA
ggggtggtttatgctgatcgg

SEQ ID NO: 3698 - DNA, 21 bp, synthetic construct
  source 1..21: mol_type = other DNA
ttggtcaaagacgtaagacaa

SEQ ID NO: 3699 - DNA, 21 bp, synthetic construct
  source 1..21: mol_type = other DNA
gcgatgcgtcttagtgaaggg

SEQ ID NO: 3700 - DNA, 21 bp, synthetic construct
  source 1..21: mol_type = other DNA
cagacgtctagtgatactaag

SEQ ID NO: 3701 - DNA, 21 bp, synthetic construct
  source 1..21: mol_type = other DNA
catacgtctagtgatactagg

SEQ ID NO: 3702 - DNA, 21 bp, synthetic construct
  source 1..21: mol_type = other DNA
gcgatgcttcttagtgagggg

SEQ ID NO: 3703 - DNA, 21 bp, synthetic construct
  source 1..21: mol_type = other DNA
gttgctcgtgaggagcttatg

SEQ ID NO: 3704 - DNA, 21 bp, synthetic construct
  source 1..21: mol_type = other DNA
accatcagccacgacaccaac

SEQ ID NO: 3705 - DNA, 21 bp, synthetic construct
  source 1..21: mol_type = other DNA
cacgtggtggcagtgggcgtg

SEQ ID NO: 3706 - DNA, 21 bp, synthetic construct
  source 1..21: mol_type = other DNA
ggctgcatgcaaacacaaaac

SEQ ID NO: 3707 - DNA, 21 bp, synthetic construct
  source 1..21: mol_type = other DNA
gcgatgcgtcttagtgaggga

SEQ ID NO: 3708 - DNA, 21 bp, synthetic construct
  source 1..21: mol_type = other DNA
ggcagcaagctggccaccacc

SEQ ID NO: 3709 - DNA, 21 bp, synthetic construct
  source 1..21: mol_type = other DNA
gtgagcgacagcggcaacaga

SEQ ID NO: 3710 - DNA, 21 bp, synthetic construct
  source 1..21: mol_type = other DNA
gtcttccaaaaaggacacgtt

SEQ ID NO: 3711 - DNA, 21 bp, synthetic construct
  source 1..21: mol_type = other DNA
gcgatgcgtcttagggagggg

SEQ ID NO: 3712 - DNA, 21 bp, synthetic construct
  source 1..21: mol_type = other DNA
ggcatgcaagacgtacgaatc

SEQ ID NO: 3713 - DNA, 21 bp, synthetic construct
  source 1..21: mol_type = other DNA
gagactgctacgaagagaatt

SEQ ID NO: 3714 - DNA, 21 bp, synthetic construct
  source 1..21: mol_type = other DNA
gcgatgcgtcttagtgagagg

SEQ ID NO: 3715 - DNA, 21 bp, synthetic construct
  source 1..21: mol_type = other DNA
cccggcatgagcggcaaggtg

SEQ ID NO: 3716 - DNA, 21 bp, synthetic construct
  source 1..21: mol_type = other DNA
gcgatgcgtcttagtaagggg

SEQ ID NO: 3717 - DNA, 21 bp, synthetic construct
  source 1..21: mol_type = other DNA
atgatgaagactgagacgtgg

SEQ ID NO: 3718 - DNA, 21 bp, synthetic construct
  source 1..21: mol_type = other DNA
gtgatgcgtcttagtgagggg

SEQ ID NO: 3719 - DNA, 21 bp, synthetic construct
  source 1..21: mol_type = other DNA
ggcataatgagaaaccaaaac

SEQ ID NO: 3720 - DNA, 21 bp, synthetic construct
  source 1..21: mol_type = other DNA
aatggtcagcgtgtttctttt

SEQ ID NO: 3721 - DNA, 21 bp, synthetic construct
  source 1..21: mol_type = other DNA
ggcagcaagcaggccaccccc

SEQ ID NO: 3722 - DNA, 21 bp, synthetic construct
  source 1..21: mol_type = other DNA
ggctccatgcaatcacaaaac

SEQ ID NO: 3723 - DNA, 21 bp, synthetic construct
  source 1..21: mol_type = other DNA
ggaatgcaagacgtacgcatc

SEQ ID NO: 3724 - DNA, 21 bp, synthetic construct
  source 1..21: mol_type = other DNA
cccaagccagagaccgccctg

SEQ ID NO: 3725 - DNA, 21 bp, synthetic construct
  source 1..21: mol_type = other DNA
gccagcaccggaatcaagctg

SEQ ID NO: 3726 - DNA, 21 bp, synthetic construct
  source 1..21: mol_type = other DNA
aatggtcagtgtgtttctttt

SEQ ID NO: 3727 - DNA, 21 bp, synthetic construct
  source 1..21: mol_type = other DNA
taggtcaaagacgtaagccaa

SEQ ID NO: 3728 - DNA, 21 bp, synthetic construct
  source 1..21: mol_type = other DNA
cccggcctgagcggaaaggtg

SEQ ID NO: 3729 - DNA, 21 bp, synthetic construct
  source 1..21: mol_type = other DNA
cttgctcgtgaggagcatatg

SEQ ID NO: 3730 - DNA, 21 bp, synthetic construct
  source 1..21: mol_type = other DNA
accatcagacacgtcaccaac

SEQ ID NO: 3731 - DNA, 21 bp, synthetic construct
  source 1..21: mol_type = other DNA
gacgagaagagcgacacccag

SEQ ID NO: 3732 - DNA, 21 bp, synthetic construct
  source 1..21: mol_type = other DNA
ggggtggttaatggtgatcgg

SEQ ID NO: 3733 - DNA, 21 bp, synthetic construct
  source 1..21: mol_type = other DNA
agaagcgaagtggtgagcgac

SEQ ID NO: 3734 - DNA, 21 bp, synthetic construct
  source 1..21: mol_type = other DNA
atgatgaagactgagactggg

SEQ ID NO: 3735 - DNA, 21 bp, synthetic construct
  source 1..21: mol_type = other DNA
agtaggacggagagttagcag

SEQ ID NO: 3736 - DNA, 21 bp, synthetic construct
  source 1..21: mol_type = other DNA
ccaggcctgagcggcaaggtg

SEQ ID NO: 3737 - DNA, 21 bp, synthetic construct
  source 1..21: mol_type = other DNA
ggctccatgcaaacacgaaac

SEQ ID NO: 3738 - DNA, 21 bp, synthetic construct
  source 1..21: mol_type = other DNA
ggcacaatcggcaacggcttc

SEQ ID NO: 3739 - DNA, 21 bp, synthetic construct
  source 1..21: mol_type = other DNA
agaagcgacgtggtgagcgcc

SEQ ID NO: 3740 - DNA, 21 bp, synthetic construct
  source 1..21: mol_type = other DNA
cctaagcggggtgagaatgag

SEQ ID NO: 3741 - DNA, 21 bp, synthetic construct
  source 1..21: mol_type = other DNA
aacagaaacaccagcgggaag

SEQ ID NO: 3742 - DNA, 21 bp, synthetic construct
  source 1..21: mol_type = other DNA
accatcagacccagcagcagc

SEQ ID NO: 3743 - DNA, 21 bp, synthetic construct
  source 1..21: mol_type = other DNA
aatggtcatggtgtttctttt

SEQ ID NO: 3744 - DNA, 21 bp, synthetic construct
  source 1..21: mol_type = other DNA
gcgatgcctcttagtgagggg

SEQ ID NO: 3745 - DNA, 21 bp, synthetic construct
  source 1..21: mol_type = other DNA
ggctccatgcaaactcaaaac

SEQ ID NO: 3746 - DNA, 21 bp, synthetic construct
  source 1..21: mol_type = other DNA
gtcaaaatataaggcgccctg

SEQ ID NO: 3747 - DNA, 21 bp, synthetic construct
  source 1..21: mol_type = other DNA
gtgagcgacagcagcaaaaga

SEQ ID NO: 3748 - DNA, 21 bp, synthetic construct
  source 1..21: mol_type = other DNA
caaaaaaaaccgatcgaacgg

SEQ ID NO: 3749 - DNA, 21 bp, synthetic construct
  source 1..21: mol_type = other DNA
aatggtcagggtgtttccttt

SEQ ID NO: 3750 - DNA, 21 bp, synthetic construct
  source 1..21: mol_type = other DNA
atgattaatcgagctactact

SEQ ID NO: 3751 - DNA, 21 bp, synthetic construct
  source 1..21: mol_type = other DNA
gtgggcagcgagagaatggac

SEQ ID NO: 3752 - DNA, 21 bp, synthetic construct
  source 1..21: mol_type = other DNA
ggtgtgactggtagggatcag

SEQ ID NO: 3753 - DNA, 21 bp, synthetic construct
  source 1..21: mol_type = other DNA
aactgaaacaccagcgagaag

SEQ ID NO: 3754 - DNA, 21 bp, synthetic construct
  source 1..21: mol_type = other DNA
agaaacaagaacaacagccag

SEQ ID NO: 3755 - DNA, 21 bp, synthetic construct
  source 1..21: mol_type = other DNA
cacgaggtggccgtgggcgtg

SEQ ID NO: 3756 - DNA, 21 bp, synthetic construct
  source 1..21: mol_type = other DNA
ggctccatgcgaacacaaaac

SEQ ID NO: 3757 - DNA, 21 bp, synthetic construct
  source 1..21: mol_type = other DNA
aacagaaacaccagccagaag

SEQ ID NO: 3758 - DNA, 21 bp, synthetic construct
  source 1..21: mol_type = other DNA
aacagaaacaccagcgagtag

SEQ ID NO: 3759 - DNA, 21 bp, synthetic construct
  source 1..21: mol_type = other DNA
gagactgctacgaagagtata

SEQ ID NO: 3760 - DNA, 21 bp, synthetic construct
  source 1..21: mol_type = other DNA
ggtgtgtctggtagggaacag

SEQ ID NO: 3761 - DNA, 21 bp, synthetic construct
  source 1..21: mol_type = other DNA
cccggcctgagcggcaagctg

SEQ ID NO: 3762 - DNA, 21 bp, synthetic construct
  source 1..21: mol_type = other DNA
aacagaaacaccagctagaag

SEQ ID NO: 3763 - DNA, 21 bp, synthetic construct
  source 1..21: mol_type = other DNA
ttggtcaaagacgaaagccaa

SEQ ID NO: 3764 - DNA, 21 bp, synthetic construct
  source 1..21: mol_type = other DNA
tacagaaacaccagcgagaag

SEQ ID NO: 3765 - DNA, 21 bp, synthetic construct
  source 1..21: mol_type = other DNA
gtgggcagagtgagaatggac

SEQ ID NO: 3766 - DNA, 21 bp, synthetic construct
  source 1..21: mol_type = other DNA
ggcataaagagaacccaaaac

SEQ ID NO: 3767 - DNA, 21 bp, synthetic construct
  source 1..21: mol_type = other DNA
cagtcgtctagtgatactagg

SEQ ID NO: 3768 - DNA, 21 bp, synthetic construct
  source 1..21: mol_type = other DNA
aacagaaacaccagcgaggag

SEQ ID NO: 3769 - DNA, 21 bp, synthetic construct
  source 1..21: mol_type = other DNA
ggcagcaagctggcaaccccc

SEQ ID NO: 3770 - DNA, 21 bp, synthetic construct
  source 1..21: mol_type = other DNA
gcggatcggactagggaaggg

SEQ ID NO: 3771 - DNA, 21 bp, synthetic construct
  source 1..21: mol_type = other DNA
ggcagacacaacgagaacccc

SEQ ID NO: 3772 - DNA, 21 bp, synthetic construct
  source 1..21: mol_type = other DNA
gagacagctacgaagagtatt

SEQ ID NO: 3773 - DNA, 21 bp, synthetic construct
  source 1..21: mol_type = other DNA
cacgtggtggacgtgggcgtg

SEQ ID NO: 3774 - DNA, 21 bp, synthetic construct
  source 1..21: mol_type = other DNA
ttggtcaaagaagtaagccaa

SEQ ID NO: 3775 - DNA, 21 bp, synthetic construct
  source 1..21: mol_type = other DNA
ggctccatgcaaacacaagac

SEQ ID NO: 3776 - DNA, 21 bp, synthetic construct
  source 1..21: mol_type = other DNA
tatcagggggctgagtagcgt

SEQ ID NO: 3777 - DNA, 21 bp, synthetic construct
  source 1..21: mol_type = other DNA
gagactgatacgaagagtatt

SEQ ID NO: 3778 - DNA, 21 bp, synthetic construct
  source 1..21: mol_type = other DNA
aacagttccgatgtcaaatct

SEQ ID NO: 3779 - DNA, 21 bp, synthetic construct
  source 1..21: mol_type = other DNA
gcaatgcgtcttagtgagggg

SEQ ID NO: 3780 - DNA, 21 bp, synthetic construct
  source 1..21: mol_type = other DNA
accagcggcccccccgtggtg

SEQ ID NO: 3781 - DNA, 21 bp, synthetic construct
  source 1..21: mol_type = other DNA
ggggtggttaatgctgatcag

SEQ ID NO: 3782 - DNA, 21 bp, synthetic construct
  source 1..21: mol_type = other DNA
aatcgtcagggtgtttctttt

SEQ ID NO: 3783 - DNA, 21 bp, synthetic construct
  source 1..21: mol_type = other DNA
aacagttccgtagtcaaatct

SEQ ID NO: 3784 - DNA, 21 bp, synthetic construct
  source 1..21: mol_type = other DNA
accatcagcccaagcagcagc

SEQ ID NO: 3785 - DNA, 21 bp, synthetic construct
  source 1..21: mol_type = other DNA
gttgctcgtgaggagcatatc

SEQ ID NO: 3786 - DNA, 21 bp, synthetic construct
  source 1..21: mol_type = other DNA
cctacgcggggtgagaatcag

SEQ ID NO: 3787 - DNA, 21 bp, synthetic construct
  source 1..21: mol_type = other DNA
caaacaacggggggatccggt

SEQ ID NO: 3788 - DNA, 21 bp, synthetic construct
  source 1..21: mol_type = other DNA
gcgctgcgtcttagtgagggg

SEQ ID NO: 3789 - DNA, 21 bp, synthetic construct
  source 1..21: mol_type = other DNA
agaaaccagaacaacagcaag

SEQ ID NO: 3790 - DNA, 21 bp, synthetic construct
  source 1..21: mol_type = other DNA
gtcagcgacagcagcaacaga

SEQ ID NO: 3791 - DNA, 21 bp, synthetic construct
  source 1..21: mol_type = other DNA
gcaggctcagaatcagcaaaa

SEQ ID NO: 3792 - DNA, 21 bp, synthetic construct
  source 1..21: mol_type = other DNA
accagcagcccccccgtcgtg

SEQ ID NO: 3793 - DNA, 21 bp, synthetic construct
  source 1..21: mol_type = other DNA
agaggcagaaacaacagcgtg

SEQ ID NO: 3794 - DNA, 21 bp, synthetic construct
  source 1..21: mol_type = other DNA
cagacgtctattgatactagg

SEQ ID NO: 3795 - DNA, 21 bp, synthetic construct
  source 1..21: mol_type = other DNA
aacagttccgttgtcaaatat

SEQ ID NO: 3796 - DNA, 21 bp, synthetic construct
  source 1..21: mol_type = other DNA
gatcatgcgccgggtacgcat

SEQ ID NO: 3797 - DNA, 21 bp, synthetic construct
  source 1..21: mol_type = other DNA
aatggtctgggtgtttctttt

SEQ ID NO: 3798 - DNA, 21 bp, synthetic construct
  source 1..21: mol_type = other DNA
tatcagggggctgagtcgcga

SEQ ID NO: 3799 - DNA, 21 bp, synthetic construct
  source 1..21: mol_type = other DNA
gttgctcttgaggagcatatg

SEQ ID NO: 3800 - DNA, 21 bp, synthetic construct
  source 1..21: mol_type = other DNA
cagaataatcttcatagttct

SEQ ID NO: 3801 - DNA, 21 bp, synthetic construct
  source 1..21: mol_type = other DNA
gtcaaaatatatggcgccctg

SEQ ID NO: 3802 - DNA, 21 bp, synthetic construct
  source 1..21: mol_type = other DNA
gttgctcatgaggagcatatg

SEQ ID NO: 3803 - DNA, 21 bp, synthetic construct
  source 1..21: mol_type = other DNA
ccttaagatagtcctacgagt

SEQ ID NO: 3804 - DNA, 21 bp, synthetic construct
  source 1..21: mol_type = other DNA
tataagggggctgagtcgcgt

SEQ ID NO: 3805 - DNA, 21 bp, synthetic construct
  source 1..21: mol_type = other DNA
cactacaaccaccccaccagc

SEQ ID NO: 3806 - DNA, 21 bp, synthetic construct
  source 1..21: mol_type = other DNA
gttgctcgtgaggatcatatg

SEQ ID NO: 3807 - DNA, 21 bp, synthetic construct
  source 1..21: mol_type = other DNA
atcggcagaatcgagaacgag

SEQ ID NO: 3808 - DNA, 21 bp, synthetic construct
  source 1..21: mol_type = other DNA
ggtgtgtcaggtagggatcag

SEQ ID NO: 3809 - DNA, 21 bp, synthetic construct
  source 1..21: mol_type = other DNA
gttgctcgtgaggagcatata

SEQ ID NO: 3810 - DNA, 21 bp, synthetic construct
  source 1..21: mol_type = other DNA
ccaacgcggggtgagaatgag

SEQ ID NO: 3811 - DNA, 21 bp, synthetic construct
  source 1..21: mol_type = other DNA
gggtatggggataataagcat

SEQ ID NO: 3812 - DNA, 21 bp, synthetic construct
  source 1..21: mol_type = other DNA
gtgagcgacagcagcgacaga

SEQ ID NO: 3813 - DNA, 21 bp, synthetic construct
  source 1..21: mol_type = other DNA
gccatgcgtcttagtgagggg

SEQ ID NO: 3814 - DNA, 21 bp, synthetic construct
  source 1..21: mol_type = other DNA
gtctccatgcaaacacaaaac

SEQ ID NO: 3815 - DNA, 21 bp, synthetic construct
  source 1..21: mol_type = other DNA
agcgagagcagacaggaggaa

SEQ ID NO: 3816 - DNA, 21 bp, synthetic construct
  source 1..21: mol_type = other DNA
ggctccatgcatacacaaaac

SEQ ID NO: 3817 - DNA, 21 bp, synthetic construct
  source 1..21: mol_type = other DNA
aaaggggccatgggcggtctg

SEQ ID NO: 3818 - DNA, 21 bp, synthetic construct
  source 1..21: mol_type = other DNA
ggctccattcaaacacaaaac

SEQ ID NO: 3819 - DNA, 21 bp, synthetic construct
  source 1..21: mol_type = other DNA
gcccggaacgtaacagaaggg

SEQ ID NO: 3820 - DNA, 21 bp, synthetic construct
  source 1..21: mol_type = other DNA
cccaaccagcagcagagccag

SEQ ID NO: 3821 - DNA, 21 bp, synthetic construct
  source 1..21: mol_type = other DNA
gcgatgcgtcctagtgagggg

SEQ ID NO: 3822 - DNA, 21 bp, synthetic construct
  source 1..21: mol_type = other DNA
cagacgtctaatgatactagg

SEQ ID NO: 3823 - DNA, 21 bp, synthetic construct
  source 1..21: mol_type = other DNA
gggagtctgacacagactcat

SEQ ID NO: 3824 - DNA, 21 bp, synthetic construct
  source 1..21: mol_type = other DNA
gagactgctaagaagagtatt

SEQ ID NO: 3825 - DNA, 21 bp, synthetic construct
  source 1..21: mol_type = other DNA
aaagccatagacggcatcgtg

SEQ ID NO: 3826 - DNA, 21 bp, synthetic construct
  source 1..21: mol_type = other DNA
ccctacaaccacaccaccagc

SEQ ID NO: 3827 - DNA, 21 bp, synthetic construct
  source 1..21: mol_type = other DNA
gcgatgcgtctagtgaggggc

SEQ ID NO: 3828 - RNA, 21 nt, synthetic construct
  source 1..21: mol_type = other RNA
aacagaaacaccagcgacaag

SEQ ID NO: 3829 - DNA, 21 bp, synthetic construct
  source 1..21: mol_type = other DNA
cctaagtcggagactgagttg

SEQ ID NO: 3830 - DNA, 21 bp, synthetic construct
  source 1..21: mol_type = other DNA
ggtgtgtctggaagggatcag

SEQ ID NO: 3831 - DNA, 21 bp, synthetic construct
  source 1..21: mol_type = other DNA
cagaggtctagtgatactagg

SEQ ID NO: 3832 - DNA, 21 bp, synthetic construct
  source 1..21: mol_type = other DNA
cacgtggtggccgagggcgtg

SEQ ID NO: 3833 - DNA, 21 bp, synthetic construct
  source 1..21: mol_type = other DNA
aacagatacaccagcgagaag

SEQ ID NO: 3834 - DNA, 21 bp, synthetic construct
  source 1..21: mol_type = other DNA
aatgggcagggtgtttctttt

SEQ ID NO: 3835 - DNA, 21 bp, synthetic construct
  source 1..21: mol_type = other DNA
accagcagcccccccgtgctg

SEQ ID NO: 3836 - DNA, 21 bp, synthetic construct
  source 1..21: mol_type = other DNA
caaacgtctagtgatactagg

SEQ ID NO: 3837 - DNA, 21 bp, synthetic construct
  source 1..21: mol_type = other DNA
gtgagtgacagcagcaacaga

SEQ ID NO: 3838 - DNA, 21 bp, synthetic construct
  source 1..21: mol_type = other DNA
gacgtgaagagagacacccag

SEQ ID NO: 3839 - DNA, 21 bp, synthetic construct
  source 1..21: mol_type = other DNA
ggtgtggttaatgctgatcgg

SEQ ID NO: 3840 - DNA, 21 bp, synthetic construct
  source 1..21: mol_type = other DNA
gttgctcgtgaggagcgtatg

SEQ ID NO: 3841 - DNA, 21 bp, synthetic construct
  source 1..21: mol_type = other DNA
aatggtcaggctgtttctttt

SEQ ID NO: 3842 - DNA, 21 bp, synthetic construct
  source 1..21: mol_type = other DNA
gcgatgcgccttagtgagggg

SEQ ID NO: 3843 - DNA, 21 bp, synthetic construct
  source 1..21: mol_type = other DNA
gttgctcgtgacgagcatatg

SEQ ID NO: 3844 - DNA, 21 bp, synthetic construct
  source 1..21: mol_type = other DNA
gttgctcgtgagcagcatatg

SEQ ID NO: 3845 - DNA, 21 bp, synthetic construct
  source 1..21: mol_type = other DNA
aacagaaacaccagtgagaag

SEQ ID NO: 3846 - DNA, 21 bp, synthetic construct
  source 1..21: mol_type = other DNA
atgatcaagactgagacgggg

SEQ ID NO: 3847 - DNA, 21 bp, synthetic construct
  source 1..21: mol_type = other DNA
ggcgccggcatggccgtgaag

SEQ ID NO: 3848 - DNA, 21 bp, synthetic construct
  source 1..21: mol_type = other DNA
ggcaccggcatggccgtgagg

SEQ ID NO: 3849 - DNA, 21 bp, synthetic construct
  source 1..21: mol_type = other DNA
ccttatgatagtcctaagagt

SEQ ID NO: 3850 - DNA, 21 bp, synthetic construct
  source 1..21: mol_type = other DNA
aacataaacaccagcgagaag

SEQ ID NO: 3851 - DNA, 21 bp, synthetic construct
  source 1..21: mol_type = other DNA
ggggtggttattgctgatcgg

SEQ ID NO: 3852 - DNA, 21 bp, synthetic construct
  source 1..21: mol_type = other DNA
aatgctcagggtgtttctttt

SEQ ID NO: 3853 - DNA, 21 bp, synthetic construct
  source 1..21: mol_type = other DNA
ggctccatgcagacacaaaac

SEQ ID NO: 3854 - DNA, 21 bp, synthetic construct
  source 1..21: mol_type = other DNA
gcgatgcgtctaagagagggg

SEQ ID NO: 3855 - DNA, 21 bp, synthetic construct
  source 1..21: mol_type = other DNA
caaacaacgcggggatccagt

SEQ ID NO: 3856 - DNA, 21 bp, synthetic construct
  source 1..21: mol_type = other DNA
gtgagcgacagcagcatcaga

SEQ ID NO: 3857 - DNA, 21 bp, synthetic construct
  source 1..21: mol_type = other DNA
cacgtggaggccgtgggcgtg

SEQ ID NO: 3858 - DNA, 21 bp, synthetic construct
  source 1..21: mol_type = other DNA
cattatgatagtcctacgagt

SEQ ID NO: 3859 - DNA, 21 bp, synthetic construct
  source 1..21: mol_type = other DNA
atgatgaagactgaggcgggg

SEQ ID NO: 3860 - DNA, 21 bp, synthetic construct
  source 1..21: mol_type = other DNA
ggcaccggcatggtcgtgaag

SEQ ID NO: 3861 - DNA, 21 bp, synthetic construct
  source 1..21: mol_type = other DNA
gcggataggactagggatggg

SEQ ID NO: 3862 - DNA, 21 bp, synthetic construct
  source 1..21: mol_type = other DNA
ttggtcaaagacgtaagcaaa

SEQ ID NO: 3863 - DNA, 21 bp, synthetic construct
  source 1..21: mol_type = other DNA
aatggtcaggttgtttctttt

SEQ ID NO: 3864 - DNA, 21 bp, synthetic construct
  source 1..21: mol_type = other DNA
accatcagccccagcagcaga

SEQ ID NO: 3865 - DNA, 21 bp, synthetic construct
  source 1..21: mol_type = other DNA
ccgaataatcttcatagtact

SEQ ID NO: 3866 - DNA, 21 bp, synthetic construct
  source 1..21: mol_type = other DNA
gccagcagcccccccgtggtg

SEQ ID NO: 3867 - DNA, 21 bp, synthetic construct
  source 1..21: mol_type = other DNA
accatcagccccagaagcagc

SEQ ID NO: 3868 - DNA, 21 bp, synthetic construct
  source 1..21: mol_type = other DNA
cccaagcccgagacagccctg

SEQ ID NO: 3869 - DNA, 21 bp, synthetic construct
  source 1..21: mol_type = other DNA
gttgcgcgtgaggagcatatg

SEQ ID NO: 3870 - DNA, 21 bp, synthetic construct
  source 1..21: mol_type = other DNA
gttgctcgtgaggtgcatatg

SEQ ID NO: 3871 - DNA, 21 bp, synthetic construct
  source 1..21: mol_type = other DNA
atgatgaggactgagacgggg

SEQ ID NO: 3872 - DNA, 21 bp, synthetic construct
  source 1..21: mol_type = other DNA
gggagtctgactcagaatcat

SEQ ID NO: 3873 - DNA, 21 bp, synthetic construct
  source 1..21: mol_type = other DNA
cccaacctgcagcagagacag

SEQ ID NO: 3874 - DNA, 21 bp, synthetic construct
  source 1..21: mol_type = other DNA
cagacgtttagtgatactagg

SEQ ID NO: 3875 - DNA, 21 bp, synthetic construct
  source 1..21: mol_type = other DNA
gggagactgactcagactcat

SEQ ID NO: 3876 - DNA, 21 bp, synthetic construct
  source 1..21: mol_type = other DNA
cctaagtcggagactgtgatg

SEQ ID NO: 3877 - DNA, 21 bp, synthetic construct
  source 1..21: mol_type = other DNA
gttgcttgtgaggagcatatg

SEQ ID NO: 3878 - DNA, 21 bp, synthetic construct
  source 1..21: mol_type = other DNA
ggggtggttaatgctgatcga

SEQ ID NO: 3879 - DNA, 21 bp, synthetic construct
  source 1..21: mol_type = other DNA
gtgagcgacagcagcaacgga

SEQ ID NO: 3880 - DNA, 21 bp, synthetic construct
  source 1..21: mol_type = other DNA
ccgaataatcatcatagttct

SEQ ID NO: 3881 - DNA, 21 bp, synthetic construct
  source 1..21: mol_type = other DNA
gcgatccgtcttagtgagggg

SEQ ID NO: 3882 - DNA, 21 bp, synthetic construct
  source 1..21: mol_type = other DNA
atgatgaagactgagccgggg

SEQ ID NO: 3883 - DNA, 21 bp, synthetic construct
  source 1..21: mol_type = other DNA
cagacgtctagtgagactagg

SEQ ID NO: 3884 - DNA, 21 bp, synthetic construct
  source 1..21: mol_type = other DNA
ctgacgtctagtgatactagg

SEQ ID NO: 3885 - DNA, 21 bp, synthetic construct
  source 1..21: mol_type = other DNA
caaacaacgggggaatccagt

SEQ ID NO: 3886 - DNA, 21 bp, synthetic construct
  source 1..21: mol_type = other DNA
accagcagcccccccctggtg

SEQ ID NO: 3887 - DNA, 21 bp, synthetic construct
  source 1..21: mol_type = other DNA
caaaaaacggggggatccagt

SEQ ID NO: 3888 - DNA, 21 bp, synthetic construct
  source 1..21: mol_type = other DNA
ggcaccagcatggccgtgaag

SEQ ID NO: 3889 - DNA, 21 bp, synthetic construct
  source 1..21: mol_type = other DNA
ccgaataatcttaatagttct

SEQ ID NO: 3890 - DNA, 21 bp, synthetic construct
  source 1..21: mol_type = other DNA
ccttatgatagtcctacgaga

SEQ ID NO: 3891 - DNA, 21 bp, synthetic construct
  source 1..21: mol_type = other DNA
accatcagacaggagaacatg

SEQ ID NO: 3892 - DNA, 21 bp, synthetic construct
  source 1..21: mol_type = other DNA
ggcaccggcgtggccgtgaag

SEQ ID NO: 3893 - DNA, 21 bp, synthetic construct
  source 1..21: mol_type = other DNA
caaataaaaccgatcgaaagg

SEQ ID NO: 3894 - DNA, 21 bp, synthetic construct
  source 1..21: mol_type = other DNA
acaatcagccacgtcaccaac

SEQ ID NO: 3895 - DNA, 21 bp, synthetic construct
  source 1..21: mol_type = other DNA
gggtatggggataatcagcaa

SEQ ID NO: 3896 - RNA, 21 nt, synthetic construct
  source 1..21: mol_type = other RNA
ggcagacacaacgagaccacc

SEQ ID NO: 3897 - DNA, 21 bp, synthetic construct
  source 1..21: mol_type = other DNA
ccgatgcgtcttagtgagggg

SEQ ID NO: 3898 - DNA, 21 bp, synthetic construct
  source 1..21: mol_type = other DNA
accaacagccccagcagcagc

SEQ ID NO: 3899 - DNA, 21 bp, synthetic construct
  source 1..21: mol_type = other DNA
gtgagcgacagcagcaacagg

SEQ ID NO: 3900 - DNA, 21 bp, synthetic construct
  source 1..21: mol_type = other DNA
gttgctcgggaggagcatatg

SEQ ID NO: 3901 - DNA, 21 bp, synthetic construct
  source 1..21: mol_type = other DNA
accatcagccccagcagaagc

SEQ ID NO: 3902 - DNA, 21 bp, synthetic construct
  source 1..21: mol_type = other DNA
cccaagcccgagaccgcccag

SEQ ID NO: 3903 - DNA, 21 bp, synthetic construct
  source 1..21: mol_type = other DNA
cctaatgatagtcctacgagt

SEQ ID NO: 3904 - DNA, 21 bp, synthetic construct
  source 1..21: mol_type = other DNA
gtgggcgacagcagcaacaga

SEQ ID NO: 3905 - DNA, 21 bp, synthetic construct
  source 1..21: mol_type = other DNA
gtgagcgacagcagcaacagt

SEQ ID NO: 3906 - DNA, 21 bp, synthetic construct
  source 1..21: mol_type = other DNA
gtgagcgacggcagcaacaga

SEQ ID NO: 3907 - DNA, 21 bp, synthetic construct
  source 1..21: mol_type = other DNA
ttggacaaagacgtaagccaa

SEQ ID NO: 3908 - DNA, 21 bp, synthetic construct
  source 1..21: mol_type = other DNA
cctacgcggggtgagaataag

SEQ ID NO: 3909 - DNA, 21 bp, synthetic construct
  source 1..21: mol_type = other DNA
cagacgtgtagtgatactagg

SEQ ID NO: 3910 - DNA, 21 bp, synthetic construct
  source 1..21: mol_type = other DNA
accatcagccacgtaaccaac

SEQ ID NO: 3911 - DNA, 21 bp, synthetic construct
  source 1..21: mol_type = other DNA
tcgatgcgtcttagtgagggg

SEQ ID NO: 3912 - DNA, 21 bp, synthetic construct
  source 1..21: mol_type = other DNA
aaagcaatcgacggcatcgtg

SEQ ID NO: 3913 - DNA, 21 bp, synthetic construct
  source 1..21: mol_type = other DNA
aaagccatcgacggcatagtg

SEQ ID NO: 3914 - DNA, 21 bp, synthetic construct
  source 1..21: mol_type = other DNA
gtttctcgtgaggagcatatg

SEQ ID NO: 3915 - DNA, 21 bp, synthetic construct
  source 1..21: mol_type = other DNA
agaagcgacgtcgtgagcgac

SEQ ID NO: 3916 - DNA, 21 bp, synthetic construct
  source 1..21: mol_type = other DNA
gccagcgccggcatcaagctg

SEQ ID NO: 3917 - DNA, 21 bp, synthetic construct
  source 1..21: mol_type = other DNA
cacgtggtggccgtgggagtg

SEQ ID NO: 3918 - DNA, 21 bp, synthetic construct
  source 1..21: mol_type = other DNA
gttgctcgtgagtagcatatg

SEQ ID NO: 3919 - DNA, 21 bp, synthetic construct
  source 1..21: mol_type = other DNA
atgattaatagtgctactact

SEQ ID NO: 3920 - DNA, 21 bp, synthetic construct
  source 1..21: mol_type = other DNA
attggggtgggtacgaagacg

SEQ ID NO: 3921 - DNA, 21 bp, synthetic construct
  source 1..21: mol_type = other DNA
cagacgtctagtgatattagg

SEQ ID NO: 3922 - DNA, 21 bp, synthetic construct
  source 1..21: mol_type = other DNA
ggtgtgtatggtagggatcag

SEQ ID NO: 3923 - DNA, 21 bp, synthetic construct
  source 1..21: mol_type = other DNA
ggctccgtgcaaacacaaaac

SEQ ID NO: 3924 - DNA, 21 bp, synthetic construct
  source 1..21: mol_type = other DNA
cagatcagaggctccgagatg

SEQ ID NO: 3925 - DNA, 21 bp, synthetic construct
  source 1..21: mol_type = other DNA
accaacagccacgtcaccaac

SEQ ID NO: 3926 - DNA, 21 bp, synthetic construct
  source 1..21: mol_type = other DNA
tatcagggggctgagacgcgt

SEQ ID NO: 3927 - DNA, 21 bp, synthetic construct
  source 1..21: mol_type = other DNA
gtattccaacaaggacacgtt

SEQ ID NO: 3928 - DNA, 21 bp, synthetic construct
  source 1..21: mol_type = other DNA
ggctccatgcaaacgcaaaac

SEQ ID NO: 3929 - DNA, 21 bp, synthetic construct
  source 1..21: mol_type = other DNA
gttgctggtgaggagcatatg

SEQ ID NO: 3930 - DNA, 21 bp, synthetic construct
  source 1..21: mol_type = other DNA
atgatgaagactgagacgcgg

SEQ ID NO: 3931 - DNA, 21 bp, synthetic construct
  source 1..21: mol_type = other DNA
atgatgaagtctgagacgggg

SEQ ID NO: 3932 - DNA, 21 bp, synthetic construct
  source 1..21: mol_type = other DNA
accagcagcccccccgtggtc

SEQ ID NO: 3933 - DNA, 21 bp, synthetic construct
  source 1..21: mol_type = other DNA
caaacaacgggcggatccagt

SEQ ID NO: 3934 - DNA, 21 bp, synthetic construct
  source 1..21: mol_type = other DNA
ggtgtgtctggtagggataag

SEQ ID NO: 3935 - DNA, 21 bp, synthetic construct
  source 1..21: mol_type = other DNA
gtgagcgacagcagctacaga

SEQ ID NO: 3936 - DNA, 21 bp, synthetic construct
  source 1..21: mol_type = other DNA
ttgatgaagactgagacgggg

SEQ ID NO: 3937 - DNA, 21 bp, synthetic construct
  source 1..21: mol_type = other DNA
aaagccatcgacggcaacgtg

SEQ ID NO: 3938 - DNA, 21 bp, synthetic construct
  source 1..21: mol_type = other DNA
gcgatacgtcttagtgagggg

SEQ ID NO: 3939 - DNA, 21 bp, synthetic construct
  source 1..21: mol_type = other DNA
aacagttccgttgtcaaaact

SEQ ID NO: 3940 - DNA, 21 bp, synthetic construct
  source 1..21: mol_type = other DNA
aatggtcagggtgttcctttt

SEQ ID NO: 3941 - DNA, 21 bp, synthetic construct
  source 1..21: mol_type = other DNA
agacaagtgcacagcaaggac

SEQ ID NO: 3942 - DNA, 21 bp, synthetic construct
  source 1..21: mol_type = other DNA
gtgagcaacagcagcaacaga

SEQ ID NO: 3943 - DNA, 21 bp, synthetic construct
  source 1..21: mol_type = other DNA
agaaaacagaacaacagccag

SEQ ID NO: 3944 - DNA, 21 bp, synthetic construct
  source 1..21: mol_type = other DNA
cccggcctgagcggcaacgtg

SEQ ID NO: 3945 - DNA, 21 bp, synthetic construct
  source 1..21: mol_type = other DNA
aagatcagaggcaccgagatg

SEQ ID NO: 3946 - DNA, 21 bp, synthetic construct
  source 1..21: mol_type = other DNA
agcggaagaaacaacagcgtg

SEQ ID NO: 3947 - DNA, 21 bp, synthetic construct
  source 1..21: mol_type = other DNA
ccctacaaccaccacaccagc

SEQ ID NO: 3948 - DNA, 21 bp, synthetic construct
  source 1..21: mol_type = other DNA
caaacaacggcgggatccagt

SEQ ID NO: 3949 - DNA, 21 bp, synthetic construct
  source 1..21: mol_type = other DNA
aacagaaacaccatcgagaag

SEQ ID NO: 3950 - DNA, 21 bp, synthetic construct
  source 1..21: mol_type = other DNA
aagacgatcggtaacggcttc

SEQ ID NO: 3951 - DNA, 21 bp, synthetic construct
  source 1..21: mol_type = other DNA
tatcagggggcagagtcgcgt

SEQ ID NO: 3952 - DNA, 21 bp, synthetic construct
  source 1..21: mol_type = other DNA
ggggtggttgatgctgatcgg

SEQ ID NO: 3953 - DNA, 21 bp, synthetic construct
  source 1..21: mol_type = other DNA
gttgacaaatcactcgttaga

SEQ ID NO: 3954 - DNA, 21 bp, synthetic construct
  source 1..21: mol_type = other DNA
gcgatgcgtcttattgagggg

SEQ ID NO: 3955 - DNA, 21 bp, synthetic construct
  source 1..21: mol_type = other DNA
atgatgaagactgggacgggg

SEQ ID NO: 3956 - DNA, 21 bp, synthetic construct
  source 1..21: mol_type = other DNA
aatggtcagggtctttctttt

SEQ ID NO: 3957 - DNA, 21 bp, synthetic construct
  source 1..21: mol_type = other DNA
gttgctcgtgtggagcatatg

SEQ ID NO: 3958 - DNA, 21 bp, synthetic construct
  source 1..21: mol_type = other DNA
cagacgtctagtgatacaggc

SEQ ID NO: 3959 - DNA, 21 bp, synthetic construct
  source 1..21: mol_type = other DNA
attggggagggtacgaagtcg

SEQ ID NO: 3960 - DNA, 21 bp, synthetic construct
  source 1..21: mol_type = other DNA
aatggtcggggtgtttctttt

SEQ ID NO: 3961 - DNA, 21 bp, synthetic construct
  source 1..21: mol_type = other DNA
gttgctcgtggggagcatatg

SEQ ID NO: 3962 - DNA, 21 bp, synthetic construct
  source 1..21: mol_type = other DNA
accggcagcccccccgtggtg

SEQ ID NO: 3963 - DNA, 21 bp, synthetic construct
  source 1..21: mol_type = other DNA
aacagaatcaccagcgagaag

SEQ ID NO: 3964 - DNA, 21 bp, synthetic construct
  source 1..21: mol_type = other DNA
agaagcgacgtggtgagcgaa

SEQ ID NO: 3965 - DNA, 21 bp, synthetic construct
  source 1..21: mol_type = other DNA
ccttatgatagacctacgagt

SEQ ID NO: 3966 - DNA, 21 bp, synthetic construct
  source 1..21: mol_type = other DNA
atgatgaagactgagacaggg

SEQ ID NO: 3967 - DNA, 21 bp, synthetic construct
  source 1..21: mol_type = other DNA
gttgctcgcgaggagcatatg

SEQ ID NO: 3968 - DNA, 21 bp, synthetic construct
  source 1..21: mol_type = other DNA
gttgctcgtgaggagcatacg

SEQ ID NO: 3969 - DNA, 21 bp, synthetic construct
  source 1..21: mol_type = other DNA
ggcaccggcatggctgtgaag

SEQ ID NO: 3970 - DNA, 21 bp, synthetic construct
  source 1..21: mol_type = other DNA
ggcagacacaaagagaccccc

SEQ ID NO: 3971 - DNA, 21 bp, synthetic construct
  source 1..21: mol_type = other DNA
caaataaaccgatcgaacggc

SEQ ID NO: 3972 - DNA, 21 bp, synthetic construct
  source 1..21: mol_type = other DNA
ccatatgatagtcctacgagt

SEQ ID NO: 3973 - DNA, 21 bp, synthetic construct
  source 1..21: mol_type = other DNA
cctaagtcggagactgtgtag

SEQ ID NO: 3974 - DNA, 21 bp, synthetic construct
  source 1..21: mol_type = other DNA
aaaacaacggggggatccagt

SEQ ID NO: 3975 - DNA, 21 bp, synthetic construct
  source 1..21: mol_type = other DNA
atggtcaaagacgtaagccaa

SEQ ID NO: 3976 - DNA, 21 bp, synthetic construct
  source 1..21: mol_type = other DNA
accataagccacgtcaccaac

SEQ ID NO: 3977 - DNA, 21 bp, synthetic construct
  source 1..21: mol_type = other DNA
ttggtaaaagacgtaagccaa

SEQ ID NO: 3978 - DNA, 21 bp, synthetic construct
  source 1..21: mol_type = other DNA
gcccggaaagttacagaaggg

SEQ ID NO: 3979 - DNA, 21 bp, synthetic construct
  source 1..21: mol_type = other DNA
ggcagcaagctggcccccccc

SEQ ID NO: 3980 - DNA, 21 bp, synthetic construct
  source 1..21: mol_type = other DNA
atgatgatgactgagacgggg

SEQ ID NO: 3981 - DNA, 21 bp, synthetic construct
  source 1..21: mol_type = other DNA
gttgctcctgaggagcatatg

SEQ ID NO: 3982 - DNA, 21 bp, synthetic construct
  source 1..21: mol_type = other DNA
aacagaaacactagcgagaag

SEQ ID NO: 3983 - DNA, 21 bp, synthetic construct
  source 1..21: mol_type = other DNA
aacagaaaccccagcgagaag

SEQ ID NO: 3984 - DNA, 21 bp, synthetic construct
  source 1..21: mol_type = other DNA
gccagcaccggcatcaagatg

SEQ ID NO: 3985 - DNA, 21 bp, synthetic construct
  source 1..21: mol_type = other DNA
atcgggcaaggagtgatcgtg

SEQ ID NO: 3986 - DNA, 21 bp, synthetic construct
  source 1..21: mol_type = other DNA
ggctccatgctaacacaaaac

SEQ ID NO: 3987 - DNA, 21 bp, synthetic construct
  source 1..21: mol_type = other DNA
accagcagcccccccgtgttg

SEQ ID NO: 3988 - DNA, 21 bp, synthetic construct
  source 1..21: mol_type = other DNA
ggcaccatcggcaacggcatc

SEQ ID NO: 3989 - DNA, 21 bp, synthetic construct
  source 1..21: mol_type = other DNA
ggctcgatgcaaacacaaaac

SEQ ID NO: 3990 - DNA, 21 bp, synthetic construct
  source 1..21: mol_type = other DNA
atctggcaaggagtgagcgtg

SEQ ID NO: 3991 - DNA, 21 bp, synthetic construct
  source 1..21: mol_type = other DNA
cagacgtcgagtgatactagg

SEQ ID NO: 3992 - DNA, 21 bp, synthetic construct
  source 1..21: mol_type = other DNA
ggatacgaaaacaacaaacac

SEQ ID NO: 3993 - DNA, 21 bp, synthetic construct
  source 1..21: mol_type = other DNA
gtgagcggcagcagcaacaga

SEQ ID NO: 3994 - DNA, 21 bp, synthetic construct
  source 1..21: mol_type = other DNA
ggctccttgcaaacacaaaac

SEQ ID NO: 3995 - DNA, 21 bp, synthetic construct
  source 1..21: mol_type = other DNA
atcgcgcaaggagtgagcgtg

SEQ ID NO: 3996 - DNA, 21 bp, synthetic construct
  source 1..21: mol_type = other DNA
gcccggaacgttaaagaaggg

SEQ ID NO: 3997 - DNA, 21 bp, synthetic construct
  source 1..21: mol_type = other DNA
ataggggtgggtacgaagtcg

SEQ ID NO: 3998 - DNA, 21 bp, synthetic construct
  source 1..21: mol_type = other DNA
tatcagggggatgagtcgcgt

SEQ ID NO: 3999 - DNA, 21 bp, synthetic construct
  source 1..21: mol_type = other DNA
gtgagcgccagcagcaacaga

SEQ ID NO: 4000 - DNA, 21 bp, synthetic construct
  source 1..21: mol_type = other DNA
cagacgtctagagatacaagg

SEQ ID NO: 4001 - protein, 7 aa, synthetic construct
VKVYGAL

SEQ ID NO: 4002 - protein, 7 aa, synthetic construct
VKSYGAL

SEQ ID NO: 4003 - protein, 7 aa, synthetic construct
QIRGMET

SEQ ID NO: 4004 - protein, 7 aa, synthetic construct
SWGNIQT

SEQ ID NO: 4005 - protein, 7 aa, synthetic construct
TRFSGTV

SEQ ID NO: 4006 - protein, 7 aa, synthetic construct
LMNGITN

SEQ ID NO: 4007 - protein, 7 aa, synthetic construct
NNTEGTR

SEQ ID NO: 4008 - protein, 7 aa, synthetic construct
TSPNNSV

SEQ ID NO: 4009 - protein, 7 aa, synthetic construct
SRSESLQ

SEQ ID NO: 4010 - protein, 7 aa, synthetic construct
VKIYGAL

SEQ ID NO: 4011 - protein, 7 aa, synthetic construct
ASRIDTS

SEQ ID NO: 4012 - protein, 7 aa, synthetic construct
GSNMATH

SEQ ID NO: 4013 - protein, 7 aa, synthetic construct
VPQAQAK

SEQ ID NO: 4014 - protein, 7 aa, synthetic construct
VAYKSLS

SEQ ID NO: 4015 - protein, 7 aa, synthetic construct
DYLSRGV

SEQ ID NO: 4016 - protein, 7 aa, synthetic construct
QQGISSS

SEQ ID NO: 4017 - protein, 7 aa, synthetic construct
ARHSADG

SEQ ID NO: 4018 - protein, 7 aa, synthetic construct
VTIGNGL

SEQ ID NO: 4019 - protein, 7 aa, synthetic construct
FINNLQM

SEQ ID NO: 4020 - protein, 7 aa, synthetic construct
VHASAAN

SEQ ID NO: 4021 - protein, 7 aa, synthetic construct
NENEQRR

SEQ ID NO: 4022 - protein, 7 aa, synthetic construct
VTVGNGF

SEQ ID NO: 4023 - protein, 7 aa, synthetic construct
MNSAKVP

SEQ ID NO: 4024 - protein, 7 aa, synthetic construct
QFASYAA

SEQ ID NO: 4025 - protein, 7 aa, synthetic construct
SGLGNNS

SEQ ID NO: 4026 - protein, 7 aa, synthetic construct
QVGSSTF

SEQ ID NO: 4027 - protein, 7 aa, synthetic construct
TGLSGKV

SEQ ID NO: 4028 - protein, 7 aa, synthetic construct
ILNGMVL

SEQ ID NO: 4029 - protein, 7 aa, synthetic construct
VTATKSI

SEQ ID NO: 4030 - protein, 7 aa, synthetic construct
SSKPATY

SEQ ID NO: 4031 - protein, 7 aa, synthetic construct
GSFHVEM

SEQ ID NO: 4032 - protein, 7 aa, synthetic construct
SKSNGTL

SEQ ID NO: 4033 - protein, 7 aa, synthetic construct
GMAIVEN

SEQ ID NO: 4034 - protein, 7 aa, synthetic construct
VTIGNGY

SEQ ID NO: 4035 - protein, 7 aa, synthetic construct
GYDHKSS

SEQ ID NO: 4036 - protein, 7 aa, synthetic construct
SDSKQLA

SEQ ID NO: 4037 - protein, 7 aa, synthetic construct
KDPGSVV

SEQ ID NO: 4038 - protein, 7 aa, synthetic construct
PEKTKID

SEQ ID NO: 4039 - protein, 7 aa, synthetic construct
RLGHSMD

SEQ ID NO: 4040 - protein, 7 aa, synthetic construct
GTRLSEG

SEQ ID NO: 4041 - protein, 7 aa, synthetic construct
QVVSSTV

SEQ ID NO: 4042 - protein, 7 aa, synthetic construct
GLSQKMT

SEQ ID NO: 4043 - protein, 7 aa, synthetic construct
LLDKWTA

SEQ ID NO: 4044 - protein, 7 aa, synthetic construct
KKETMIL

SEQ ID NO: 4045 - protein, 7 aa, synthetic construct
RNAPNID

SEQ ID NO: 4046 - protein, 7 aa, synthetic construct
SMVKNVD

SEQ ID NO: 4047 - protein, 7 aa, synthetic construct
GRASADN

SEQ ID NO: 4048 - protein, 7 aa, synthetic construct
HAPPAMV

SEQ ID NO: 4049 - protein, 7 aa, synthetic construct
EIKPIDR

SEQ ID NO: 4050 - protein, 7 aa, synthetic construct
LHYLSTA

SEQ ID NO: 4051 - protein, 7 aa, synthetic construct
SLVQNVV

SEQ ID NO: 4052 - protein, 7 aa, synthetic construct
SSLGNHS

SEQ ID NO: 4053 - protein, 7 aa, synthetic construct
NGKGIEL

SEQ ID NO: 4054 - protein, 7 aa, synthetic construct
QNTGGSS

SEQ ID NO: 4055 - protein, 7 aa, synthetic construct
ETATKSI

SEQ ID NO: 4056 - protein, 7 aa, synthetic construct
RSPNNSE

SEQ ID NO: 4057 - protein, 7 aa, synthetic construct
PQSINSG

SEQ ID NO: 4058 - protein, 7 aa, synthetic construct
PENTKIN

SEQ ID NO: 4059 - protein, 7 aa, synthetic construct
RRDLLDG

SEQ ID NO: 4060 - protein, 7 aa, synthetic construct
RTSNSDI

SEQ ID NO: 4061 - protein, 7 aa, synthetic construct
DVENRGK

SEQ ID NO: 4062 - protein, 7 aa, synthetic construct
APSGIKL

SEQ ID NO: 4063 - protein, 7 aa, synthetic construct
LVKDATQ

SEQ ID NO: 4064 - protein, 7 aa, synthetic construct
GIIQTQN

SEQ ID NO: 4065 - protein, 7 aa, synthetic construct
EKVVKVT

SEQ ID NO: 4066 - protein, 7 aa, synthetic construct
GYVLKTS

SEQ ID NO: 4067 - protein, 7 aa, synthetic construct
MVTQHLI

SEQ ID NO: 4068 - protein, 7 aa, synthetic construct
SDPKIHK

SEQ ID NO: 4069 - protein, 7 aa, synthetic construct
WKETQGD

SEQ ID NO: 4070 - protein, 7 aa, synthetic construct
SRDDTIS

SEQ ID NO: 4071 - protein, 7 aa, synthetic construct
GEYQNMR

SEQ ID NO: 4072 - protein, 7 aa, synthetic construct
KLGHNYG

SEQ ID NO: 4073 - protein, 7 aa, synthetic construct
RRERTEQ

SEQ ID NO: 4074 - protein, 7 aa, synthetic construct
TIHNVII

SEQ ID NO: 4075 - protein, 7 aa, synthetic construct
GLGSTRE

SEQ ID NO: 4076 - protein, 7 aa, synthetic construct
RLNHLDT

SEQ ID NO: 4077 - protein, 7 aa, synthetic construct
TGKGIES

SEQ ID NO: 4078 - protein, 7 aa, synthetic construct
QVGSPTV

SEQ ID NO: 4079 - protein, 7 aa, synthetic construct
LRVGDTL

SEQ ID NO: 4080 - protein, 7 aa, synthetic construct
DKNAATA

SEQ ID NO: 4081 - protein, 7 aa, synthetic construct
GAREEHT

SEQ ID NO: 4082 - protein, 7 aa, synthetic construct
LRVGSGI

SEQ ID NO: 4083 - protein, 7 aa, synthetic construct
SLSLQMK

SEQ ID NO: 4084 - protein, 7 aa, synthetic construct
QIRGMEI

SEQ ID NO: 4085 - protein, 7 aa, synthetic construct
LTRGENV

SEQ ID NO: 4086 - protein, 7 aa, synthetic construct
PTRGENE

SEQ ID NO: 4087 - protein, 7 aa, synthetic construct
RSLTTQT

SEQ ID NO: 4088 - protein, 7 aa, synthetic construct
NSGDNRL

SEQ ID NO: 4089 - protein, 7 aa, synthetic construct
LKEPMML

SEQ ID NO: 4090 - protein, 7 aa, synthetic construct
VTIVNGI

SEQ ID NO: 4091 - protein, 7 aa, synthetic construct
NRNTADN

SEQ ID NO: 4092 - protein, 7 aa, synthetic construct
SGGSEGR

SEQ ID NO: 4093 - protein, 7 aa, synthetic construct
GVMQTQN

SEQ ID NO: 4094 - protein, 7 aa, synthetic construct
DKANLHT

SEQ ID NO: 4095 - protein, 7 aa, synthetic construct
GVSKTLL

SEQ ID NO: 4096 - protein, 7 aa, synthetic construct
DYLSRGI

SEQ ID NO: 4097 - protein, 7 aa, synthetic construct
GRLTETH

SEQ ID NO: 4098 - protein, 7 aa, synthetic construct
PLSSANL

SEQ ID NO: 4099 - protein, 7 aa, synthetic construct
HIKSSET

SEQ ID NO: 4100 - protein, 7 aa, synthetic construct
IRDQTAI

SEQ ID NO: 4101 - protein, 7 aa, synthetic construct
DVKSSET

SEQ ID NO: 4102 - protein, 7 aa, synthetic construct
PGSYGVS

SEQ ID NO: 4103 - protein, 7 aa, synthetic construct
QTIGNGF

SEQ ID NO: 4104 - protein, 7 aa, synthetic construct
SVGLTKI

SEQ ID NO: 4105 - protein, 7 aa, synthetic construct
MKDKMIL

SEQ ID NO: 4106 - protein, 7 aa, synthetic construct
KDPGSAA

SEQ ID NO: 4107 - protein, 7 aa, synthetic construct
SKPETVL

SEQ ID NO: 4108 - protein, 7 aa, synthetic construct
SQGAESI

SEQ ID NO: 4109 - protein, 7 aa, synthetic construct
NHTESRG

SEQ ID NO: 4110 - protein, 7 aa, synthetic construct
SEPGVSV

SEQ ID NO: 4111 - protein, 7 aa, synthetic construct
SERRQAD

SEQ ID NO: 4112 - protein, 7 aa, synthetic construct
SGLSGKM

SEQ ID NO: 4113 - protein, 7 aa, synthetic construct
LGSESAI

SEQ ID NO: 4114 - protein, 7 aa, synthetic construct
MRDQTAI

SEQ ID NO: 4115 - protein, 7 aa, synthetic construct
GPAGKTN

SEQ ID NO: 4116 - protein, 7 aa, synthetic construct
NQTESRG

SEQ ID NO: 4117 - protein, 7 aa, synthetic construct
RTSNGDI

SEQ ID NO: 4118 - protein, 7 aa, synthetic construct
KGLINQQ

SEQ ID NO: 4119 - protein, 7 aa, synthetic construct
GNVLKSS

SEQ ID NO: 4120 - protein, 7 aa, synthetic construct
GYVIKSS

SEQ ID NO: 4121 - protein, 7 aa, synthetic construct
MNQNNTQ

SEQ ID NO: 4122 - protein, 7 aa, synthetic construct
VGRERAI

SEQ ID NO: 4123 - protein, 7 aa, synthetic construct
TTANNSE

SEQ ID NO: 4124 - protein, 7 aa, synthetic construct
DKNTATG

SEQ ID NO: 4125 - protein, 7 aa, synthetic construct
PVGVHIG

SEQ ID NO: 4126 - protein, 7 aa, synthetic construct
GLGGTPE

SEQ ID NO: 4127 - protein, 7 aa, synthetic construct
PKLETVL

SEQ ID NO: 4128 - protein, 7 aa, synthetic construct
TGDRNQV

SEQ ID NO: 4129 - protein, 7 aa, synthetic construct
GTNSKMV

SEQ ID NO: 4130 - protein, 7 aa, synthetic construct
NYDYSRT

SEQ ID NO: 4131 - protein, 7 aa, synthetic construct
PPRGENV

SEQ ID NO: 4132 - protein, 7 aa, synthetic construct
LLHTTAN

SEQ ID NO: 4133 - protein, 7 aa, synthetic construct
GLTGYPH

SEQ ID NO: 4134 - protein, 7 aa, synthetic construct
GLTRVSD

SEQ ID NO: 4135 - protein, 7 aa, synthetic construct
SQIIKRE

SEQ ID NO: 4136 - protein, 7 aa, synthetic construct
EKGKLIA

SEQ ID NO: 4137 - protein, 7 aa, synthetic construct
GNGTHNP

SEQ ID NO: 4138 - protein, 7 aa, synthetic construct
RRDDTIF

SEQ ID NO: 4139 - protein, 7 aa, synthetic construct
LHDFSTA

SEQ ID NO: 4140 - protein, 7 aa, synthetic construct
NHNGGPP

SEQ ID NO: 4141 - protein, 7 aa, synthetic construct
GTLPIMA

SEQ ID NO: 4142 - protein, 7 aa, synthetic construct
ALTVGQK

SEQ ID NO: 4143 - protein, 7 aa, synthetic construct
SLLTGYI

SEQ ID NO: 4144 - protein, 7 aa, synthetic construct
EHDASRN

SEQ ID NO: 4145 - protein, 7 aa, synthetic construct
LTDTKLP

SEQ ID NO: 4146 - protein, 7 aa, synthetic construct
AHDRGQL

SEQ ID NO: 4147 - protein, 7 aa, synthetic construct
ATNSEKV

SEQ ID NO: 4148 - protein, 7 aa, synthetic construct
ARNVIES

SEQ ID NO: 4149 - protein, 7 aa, synthetic construct
AERGVTS

SEQ ID NO: 4150 - protein, 7 aa, synthetic construct
GNGTRNT

SEQ ID NO: 4151 - protein, 7 aa, synthetic construct
RSVTTEQ

SEQ ID NO: 4152 - protein, 7 aa, synthetic construct
PLVAVGV

SEQ ID NO: 4153 - protein, 7 aa, synthetic construct
PGRETPT

SEQ ID NO: 4154 - protein, 7 aa, synthetic construct
LLKNGLI

SEQ ID NO: 4155 - protein, 7 aa, synthetic construct
KKETIIL

SEQ ID NO: 4156 - protein, 7 aa, synthetic construct
VGSKSAI

SEQ ID NO: 4157 - protein, 7 aa, synthetic construct
ALSVGQK

SEQ ID NO: 4158 - protein, 7 aa, synthetic construct
TRNVIEG

SEQ ID NO: 4159 - protein, 7 aa, synthetic construct
LVKDLTQ

SEQ ID NO: 4160 - protein, 7 aa, synthetic construct
GRHNETP

SEQ ID NO: 4161 - protein, 7 aa, synthetic construct
KWSVNLE

SEQ ID NO: 4162 - protein, 7 aa, synthetic construct
MKETLML

SEQ ID NO: 4163 - protein, 7 aa, synthetic construct
NEVGTKS

SEQ ID NO: 4164 - protein, 7 aa, synthetic construct
PMNGITN

SEQ ID NO: 4165 - protein, 7 aa, synthetic construct
KAVDGIV

SEQ ID NO: 4166 - protein, 7 aa, synthetic construct
GVDNAGR

SEQ ID NO: 4167 - protein, 7 aa, synthetic construct
MMKTETG

SEQ ID NO: 4168 - protein, 7 aa, synthetic construct
NSGDNQP

SEQ ID NO: 4169 - protein, 7 aa, synthetic construct
TEPGMSV

SEQ ID NO: 4170 - protein, 7 aa, synthetic construct
RTSNSDN

SEQ ID NO: 4171 - protein, 7 aa, synthetic construct
VIKDRVL

SEQ ID NO: 4172 - protein, 7 aa, synthetic construct
SGSQDTT

SEQ ID NO: 4173 - protein, 7 aa, synthetic construct
QLSTAST

SEQ ID NO: 4174 - protein, 7 aa, synthetic construct
GSLTETQ

SEQ ID NO: 4175 - protein, 7 aa, synthetic construct
ARHNETT

SEQ ID NO: 4176 - protein, 7 aa, synthetic construct
GESKVHE

SEQ ID NO: 4177 - protein, 7 aa, synthetic construct
VSSGNGF

SEQ ID NO: 4178 - protein, 7 aa, synthetic construct
AKAPGTG

SEQ ID NO: 4179 - protein, 7 aa, synthetic construct
KKEPMMM

SEQ ID NO: 4180 - protein, 7 aa, synthetic construct
GGSHVEM

SEQ ID NO: 4181 - protein, 7 aa, synthetic construct
GMHNETT

SEQ ID NO: 4182 - protein, 7 aa, synthetic construct
GLSQKML

SEQ ID NO: 4183 - protein, 7 aa, synthetic construct
SESKQLS

SEQ ID NO: 4184 - protein, 7 aa, synthetic construct
VPQAQAQ

SEQ ID NO: 4185 - protein, 7 aa, synthetic construct
GITEKSY

SEQ ID NO: 4186 - protein, 7 aa, synthetic construct
QRTTSGG

SEQ ID NO: 4187 - protein, 7 aa, synthetic construct
GLSQKMM

SEQ ID NO: 4188 - protein, 7 aa, synthetic construct
QTTGGSL

SEQ ID NO: 4189 - protein, 7 aa, synthetic construct
GYEVNQH

SEQ ID NO: 4190 - protein, 7 aa, synthetic construct
LTKVDTV

SEQ ID NO: 4191 - protein, 7 aa, synthetic construct
PFDSHTS

SEQ ID NO: 4192 - protein, 7 aa, synthetic construct
GANKTLL

SEQ ID NO: 4193 - protein, 7 aa, synthetic construct
GSLTETR

SEQ ID NO: 4194 - protein, 7 aa, synthetic construct
LATSRGS

SEQ ID NO: 4195 - protein, 7 aa, synthetic construct
TIHQVIN

SEQ ID NO: 4196 - protein, 7 aa, synthetic construct
GIPWNTQ

SEQ ID NO: 4197 - protein, 7 aa, synthetic construct
LRERDGH

SEQ ID NO: 4198 - protein, 7 aa, synthetic construct
SESRQED

SEQ ID NO: 4199 - protein, 7 aa, synthetic construct
VSNFATH

SEQ ID NO: 4200 - protein, 7 aa, synthetic construct
LRDGDTP

SEQ ID NO: 4201 - protein, 7 aa, synthetic construct
PYDSHSS

SEQ ID NO: 4202 - protein, 7 aa, synthetic construct
GVLHIAS

SEQ ID NO: 4203 - protein, 7 aa, synthetic construct
RTSYSDI

SEQ ID NO: 4204 - protein, 7 aa, synthetic construct
GVSASVH

SEQ ID NO: 4205 - protein, 7 aa, synthetic construct
VQQAQAQ

SEQ ID NO: 4206 - protein, 7 aa, synthetic construct
GSLIETH

SEQ ID NO: 4207 - protein, 7 aa, synthetic construct
LVKNGHI

SEQ ID NO: 4208 - protein, 7 aa, synthetic construct
NSMGERG

SEQ ID NO: 4209 - protein, 7 aa, synthetic construct
TESRQAD

SEQ ID NO: 4210 - protein, 7 aa, synthetic construct
SESKLLA

SEQ ID NO: 4211 - protein, 7 aa, synthetic construct
MNSTKVT

SEQ ID NO: 4212 - protein, 7 aa, synthetic construct
RDDRDAR

SEQ ID NO: 4213 - protein, 7 aa, synthetic construct
SESRKED

SEQ ID NO: 4214 - protein, 7 aa, synthetic construct
PALRPQM

SEQ ID NO: 4215 - protein, 7 aa, synthetic construct
GVSDMVQ

SEQ ID NO: 4216 - protein, 7 aa, synthetic construct
RKETQGD

SEQ ID NO: 4217 - protein, 7 aa, synthetic construct
FTLKGSG

SEQ ID NO: 4218 - protein, 7 aa, synthetic construct
MKETMKL

SEQ ID NO: 4219 - protein, 7 aa, synthetic construct
HLVADGV

SEQ ID NO: 4220 - protein, 7 aa, synthetic construct
MMKIGTG

SEQ ID NO: 4221 - protein, 7 aa, synthetic construct
GEMRSHV

SEQ ID NO: 4222 - protein, 7 aa, synthetic construct
ASTGIKL

SEQ ID NO: 4223 - protein, 7 aa, synthetic construct
LGTSRVS

SEQ ID NO: 4224 - protein, 7 aa, synthetic construct
NVKSSET

SEQ ID NO: 4225 - protein, 7 aa, synthetic construct
TSPKKSE

SEQ ID NO: 4226 - protein, 7 aa, synthetic construct
SQSFNSG

SEQ ID NO: 4227 - protein, 7 aa, synthetic construct
TINQVIK

SEQ ID NO: 4228 - protein, 7 aa, synthetic construct
GQARVPI

SEQ ID NO: 4229 - protein, 7 aa, synthetic construct
PRNVIEG

SEQ ID NO: 4230 - protein, 7 aa, synthetic construct
TGLAVHS

SEQ ID NO: 4231 - protein, 7 aa, synthetic construct
ASQEQTR

SEQ ID NO: 4232 - protein, 7 aa, synthetic construct
VVNHTEI

SEQ ID NO: 4233 - protein, 7 aa, synthetic construct
PGILTET

SEQ ID NO: 4234 - protein, 7 aa, synthetic construct
NGFAVHS

SEQ ID NO: 4235 - protein, 7 aa, synthetic construct
GAREEHK

SEQ ID NO: 4236 - protein, 7 aa, synthetic construct
LVDQNSV

SEQ ID NO: 4237 - protein, 7 aa, synthetic construct
LTKGDSV

SEQ ID NO: 4238 - protein, 7 aa, synthetic construct
GSASADN

SEQ ID NO: 4239 - protein, 7 aa, synthetic construct
LLDKCTA

SEQ ID NO: 4240 - protein, 7 aa, synthetic construct
ELSRLTL

SEQ ID NO: 4241 - protein, 7 aa, synthetic construct
GNKLHID

SEQ ID NO: 4242 - protein, 7 aa, synthetic construct
GRARADN

SEQ ID NO: 4243 - protein, 7 aa, synthetic construct
PYNLLSS

SEQ ID NO: 4244 - protein, 7 aa, synthetic construct
SKSNETP

SEQ ID NO: 4245 - protein, 7 aa, synthetic construct
KNETMIL

SEQ ID NO: 4246 - protein, 7 aa, synthetic construct
GIMQTHN

SEQ ID NO: 4247 - protein, 7 aa, synthetic construct
GRASAEN

SEQ ID NO: 4248 - protein, 7 aa, synthetic construct
GRASADK

SEQ ID NO: 4249 - protein, 7 aa, synthetic construct
LLEKWTA

SEQ ID NO: 4250 - protein, 7 aa, synthetic construct
ATRLSEV

SEQ ID NO: 4251 - protein, 7 aa, synthetic construct
PTENSGV

SEQ ID NO: 4252 - protein, 7 aa, synthetic construct
AVSVGQK

SEQ ID NO: 4253 - protein, 7 aa, synthetic construct
KKETMIF

SEQ ID NO: 4254 - protein, 7 aa, synthetic construct
MDTQHII

SEQ ID NO: 4255 - protein, 7 aa, synthetic construct
SRVDVNR

SEQ ID NO: 4256 - protein, 7 aa, synthetic construct
GVSARAQ

SEQ ID NO: 4257 - protein, 6 aa, synthetic construct
LLDKTA

SEQ ID NO: 4258 - protein, 7 aa, synthetic construct
LLDKRTA

SEQ ID NO: 4259 - protein, 7 aa, synthetic construct
GNEDNQH

SEQ ID NO: 4260 - protein, 7 aa, synthetic construct
SGAMGGK

SEQ ID NO: 4261 - protein, 7 aa, synthetic construct
RRSGLEM

SEQ ID NO: 4262 - protein, 7 aa, synthetic construct
KWTLNLE

SEQ ID NO: 4263 - protein, 7 aa, synthetic construct
HDKSTET

SEQ ID NO: 4264 - protein, 7 aa, synthetic construct
LVREGRE

SEQ ID NO: 4265 - protein, 7 aa, synthetic construct
GRHNEST

SEQ ID NO: 4266 - protein, 7 aa, synthetic construct
EKNPTVM

SEQ ID NO: 4267 - protein, 7 aa, synthetic construct
SGAMGGV

SEQ ID NO: 4268 - protein, 7 aa, synthetic construct
MENGVKR

SEQ ID NO: 4269 - protein, 7 aa, synthetic construct
PNNLPTS

SEQ ID NO: 4270 - protein, 7 aa, synthetic construct
SLVGSGI

SEQ ID NO: 4271 - protein, 7 aa, synthetic construct
MDTKHLI

SEQ ID NO: 4272 - protein, 7 aa, synthetic construct
TNHQDNK

SEQ ID NO: 4273 - protein, 7 aa, synthetic construct
VSATNSI

SEQ ID NO: 4274 - protein, 7 aa, synthetic construct
GVNNTLL

SEQ ID NO: 4275 - protein, 7 aa, synthetic construct
NDPKIHK

SEQ ID NO: 4276 - protein, 7 aa, synthetic construct
PTRGENL

SEQ ID NO: 4277 - protein, 7 aa, synthetic construct
LTDTKLT

SEQ ID NO: 4278 - protein, 7 aa, synthetic construct
PQNTKID

SEQ ID NO: 4279 - protein, 7 aa, synthetic construct
RFEQVSN

SEQ ID NO: 4280 - protein, 7 aa, synthetic construct
GTNSEME

SEQ ID NO: 4281 - protein, 7 aa, synthetic construct
GDPNREK

SEQ ID NO: 4282 - protein, 7 aa, synthetic construct
DLRTSTL

SEQ ID NO: 4283 - protein, 7 aa, synthetic construct
DVENPGK

SEQ ID NO: 4284 - protein, 7 aa, synthetic construct
SGSRDTR

SEQ ID NO: 4285 - protein, 7 aa, synthetic construct
QQGVSSP

SEQ ID NO: 4286 - protein, 7 aa, synthetic construct
SESKNLA

SEQ ID NO: 4287 - protein, 7 aa, synthetic construct
RLTRDDT

SEQ ID NO: 4288 - protein, 7 aa, synthetic construct
VTKVDSV

SEQ ID NO: 4289 - protein, 7 aa, synthetic construct
RERDETT

SEQ ID NO: 4290 - protein, 7 aa, synthetic construct
KNTTGVS

SEQ ID NO: 4291 - protein, 7 aa, synthetic construct
KVVSSDM

SEQ ID NO: 4292 - protein, 7 aa, synthetic construct
GPAVKTS

SEQ ID NO: 4293 - protein, 7 aa, synthetic construct
TGKEIEL

SEQ ID NO: 4294 - protein, 7 aa, synthetic construct
RTSNSEI

SEQ ID NO: 4295 - protein, 7 aa, synthetic construct
ELDATSK

SEQ ID NO: 4296 - protein, 7 aa, synthetic construct
EKNYPLH

SEQ ID NO: 4297 - protein, 7 aa, synthetic construct
PGTYGGE

SEQ ID NO: 4298 - protein, 7 aa, synthetic construct
RERADTT

SEQ ID NO: 4299 - protein, 7 aa, synthetic construct
SNVDIKL

SEQ ID NO: 4300 - protein, 7 aa, synthetic construct
TRSPPVS

SEQ ID NO: 4301 - protein, 7 aa, synthetic construct
GMTGLNM

SEQ ID NO: 4302 - protein, 7 aa, synthetic construct
RERVDTI

SEQ ID NO: 4303 - protein, 7 aa, synthetic construct
RIGMELA

SEQ ID NO: 4304 - protein, 7 aa, synthetic construct
GIMRTQM

SEQ ID NO: 4305 - protein, 7 aa, synthetic construct
SGVREGR

SEQ ID NO: 4306 - protein, 7 aa, synthetic construct
SVSLTRI

SEQ ID NO: 4307 - protein, 7 aa, synthetic construct
TKFSGTI

SEQ ID NO: 4308 - protein, 7 aa, synthetic construct
DRDGNKL

SEQ ID NO: 4309 - protein, 7 aa, synthetic construct
ATRLSDG

SEQ ID NO: 4310 - protein, 7 aa, synthetic construct
NVVSSSM

SEQ ID NO: 4311 - protein, 7 aa, synthetic construct
KKDTMIL

SEQ ID NO: 4312 - protein, 7 aa, synthetic construct
VGASAAN

SEQ ID NO: 4313 - protein, 7 aa, synthetic construct
RLGGTRE

SEQ ID NO: 4314 - protein, 7 aa, synthetic construct
EIVNAVR

SEQ ID NO: 4315 - protein, 7 aa, synthetic construct
KKETKIL

SEQ ID NO: 4316 - protein, 7 aa, synthetic construct
QIRGMGM

SEQ ID NO: 4317 - protein, 7 aa, synthetic construct
KVTGGDY

SEQ ID NO: 4318 - protein, 7 aa, synthetic construct
NIHKVIM

SEQ ID NO: 4319 - protein, 7 aa, synthetic construct
GYGLSGN

SEQ ID NO: 4320 - protein, 7 aa, synthetic construct
GRDSADN

SEQ ID NO: 4321 - protein, 7 aa, synthetic construct
VTGMSVK

SEQ ID NO: 4322 - protein, 7 aa, synthetic construct
GFLSGPV

SEQ ID NO: 4323 - protein, 7 aa, synthetic construct
KETQHLI

SEQ ID NO: 4324 - protein, 7 aa, synthetic construct
NRNASDN

SEQ ID NO: 4325 - protein, 7 aa, synthetic construct
VISQKPI

SEQ ID NO: 4326 - protein, 7 aa, synthetic construct
HGSYGGE

SEQ ID NO: 4327 - protein, 7 aa, synthetic construct
AKYNETL

SEQ ID NO: 4328 - protein, 6 aa, synthetic construct
KKETMI

SEQ ID NO: 4329 - protein, 7 aa, synthetic construct
GTLPNTA

SEQ ID NO: 4330 - protein, 7 aa, synthetic construct
TEPAVSV

SEQ ID NO: 4331 - protein, 7 aa, synthetic construct
GRMNNAT

SEQ ID NO: 4332 - protein, 7 aa, synthetic construct
VVSNGWP

SEQ ID NO: 4333 - protein, 7 aa, synthetic construct
QLSTTSM

SEQ ID NO: 4334 - protein, 7 aa, synthetic construct
VLSPKIV

SEQ ID NO: 4335 - protein, 7 aa, synthetic construct
TEVQAQA

SEQ ID NO: 4336 - protein, 7 aa, synthetic construct
ALTGIKL

SEQ ID NO: 4337 - protein, 7 aa, synthetic construct
DKVGVAV

SEQ ID NO: 4338 - protein, 7 aa, synthetic construct
NKETMIL

SEQ ID NO: 4339 - protein, 7 aa, synthetic construct
RERFDTT

SEQ ID NO: 4340 - protein, 7 aa, synthetic construct
SLVQNVI

SEQ ID NO: 4341 - protein, 7 aa, synthetic construct
ILDKWTA

SEQ ID NO: 4342 - protein, 7 aa, synthetic construct
ADGLSKM

SEQ ID NO: 4343 - protein, 7 aa, synthetic construct
PGSYGGD

SEQ ID NO: 4344 - protein, 7 aa, synthetic construct
QVGSSTY

SEQ ID NO: 4345 - protein, 7 aa, synthetic construct
EKSPSVM

SEQ ID NO: 4346 - protein, 7 aa, synthetic construct
HAMIHGV

SEQ ID NO: 4347 - protein, 7 aa, synthetic construct
SGLSVKV

SEQ ID NO: 4348 - protein, 7 aa, synthetic construct
GLGGNRE

SEQ ID NO: 4349 - protein, 7 aa, synthetic construct
GFGLSGN

SEQ ID NO: 4350 - protein, 7 aa, synthetic construct
KWTVNIE

SEQ ID NO: 4351 - protein, 7 aa, synthetic construct
TRFSGTE

SEQ ID NO: 4352 - protein, 7 aa, synthetic construct
VRATGTH

SEQ ID NO: 4353 - protein, 7 aa, synthetic construct
HAPPAIV

SEQ ID NO: 4354 - protein, 7 aa, synthetic construct
KQIKDAT

SEQ ID NO: 4355 - protein, 7 aa, synthetic construct
TIERTST

SEQ ID NO: 4356 - protein, 7 aa, synthetic construct
KKETMIM

SEQ ID NO: 4357 - protein, 7 aa, synthetic construct
EKSPAVM

SEQ ID NO: 4358 - protein, 7 aa, synthetic construct
GRHNETT

SEQ ID NO: 4359 - protein, 7 aa, synthetic construct
MNGVSPH

SEQ ID NO: 4360 - protein, 7 aa, synthetic construct
EIKPIQR

SEQ ID NO: 4361 - protein, 7 aa, synthetic construct
VFGNTIG

SEQ ID NO: 4362 - protein, 7 aa, synthetic construct
AVNKTLL

SEQ ID NO: 4363 - protein, 7 aa, synthetic construct
RTSNSDV

SEQ ID NO: 4364 - protein, 7 aa, synthetic construct
HAPPAML

SEQ ID NO: 4365 - protein, 7 aa, synthetic construct
VVAVASS

SEQ ID NO: 4366 - protein, 7 aa, synthetic construct
VRLSEHI

SEQ ID NO: 4367 - protein, 7 aa, synthetic construct
SVSLTKN

SEQ ID NO: 4368 - protein, 7 aa, synthetic construct
QQGDTSS

SEQ ID NO: 4369 - protein, 7 aa, synthetic construct
QVDSGPA

SEQ ID NO: 4370 - protein, 7 aa, synthetic construct
EKGPHNA

SEQ ID NO: 4371 - protein, 7 aa, synthetic construct
PRVGDTP

SEQ ID NO: 4372 - protein, 7 aa, synthetic construct
LVLQSST

SEQ ID NO: 4373 - protein, 7 aa, synthetic construct
GKQGENQ

SEQ ID NO: 4374 - protein, 7 aa, synthetic construct
NQKESRG

SEQ ID NO: 4375 - protein, 7 aa, synthetic construct
RDRVILI

SEQ ID NO: 4376 - protein, 7 aa, synthetic construct
GSYDQGM

SEQ ID NO: 4377 - protein, 7 aa, synthetic construct
RKDLLMG

SEQ ID NO: 4378 - protein, 7 aa, synthetic construct
VLSPNIM

SEQ ID NO: 4379 - protein, 7 aa, synthetic construct
ATRLSDV

SEQ ID NO: 4380 - protein, 7 aa, synthetic construct
QVLKNGA

SEQ ID NO: 4381 - protein, 7 aa, synthetic construct
GKAIVEN

SEQ ID NO: 4382 - protein, 7 aa, synthetic construct
VTIGDGF

SEQ ID NO: 4383 - protein, 7 aa, synthetic construct
DPITKNI

SEQ ID NO: 4384 - protein, 7 aa, synthetic construct
VFEAHSV

SEQ ID NO: 4385 - protein, 7 aa, synthetic construct
HVGSSTV

SEQ ID NO: 4386 - protein, 7 aa, synthetic construct
VIASYAD

SEQ ID NO: 4387 - protein, 7 aa, synthetic construct
QFRGMEM

SEQ ID NO: 4388 - protein, 7 aa, synthetic construct
SESSQED

SEQ ID NO: 4389 - protein, 7 aa, synthetic construct
KAELNRV

SEQ ID NO: 4390 - protein, 7 aa, synthetic construct
GLGGTRD

SEQ ID NO: 4391 - protein, 7 aa, synthetic construct
YLKINNM

SEQ ID NO: 4392 - protein, 7 aa, synthetic construct
KAMDGII

SEQ ID NO: 4393 - protein, 7 aa, synthetic construct
GSASAHN

SEQ ID NO: 4394 - protein, 7 aa, synthetic construct
MENGADK

SEQ ID NO: 4395 - protein, 7 aa, synthetic construct
ASQESSR

SEQ ID NO: 4396 - protein, 7 aa, synthetic construct
GIKEKNY

SEQ ID NO: 4397 - protein, 7 aa, synthetic construct
SWGNIKT

SEQ ID NO: 4398 - protein, 7 aa, synthetic construct
GRASDDN

SEQ ID NO: 4399 - protein, 7 aa, synthetic construct
NVSLSGI

SEQ ID NO: 4400 - protein, 7 aa, synthetic construct
SRGNIQT

SEQ ID NO: 4401 - protein, 7 aa, synthetic construct
HGPPAIV

SEQ ID NO: 4402 - protein, 7 aa, synthetic construct
RTSNSNI

SEQ ID NO: 4403 - protein, 7 aa, synthetic construct
ARNESEG

SEQ ID NO: 4404 - protein, 7 aa, synthetic construct
NHNGGLQ

SEQ ID NO: 4405 - protein, 7 aa, synthetic construct
SDSRQED

SEQ ID NO: 4406 - protein, 7 aa, synthetic construct
KIDTIKL

SEQ ID NO: 4407 - protein, 7 aa, synthetic construct
QATGGSS

SEQ ID NO: 4408 - protein, 7 aa, synthetic construct
DKIYGAL

SEQ ID NO: 4409 - protein, 7 aa, synthetic construct
SVTAGRL

SEQ ID NO: 4410 - protein, 7 aa, synthetic construct
AAYKALS

SEQ ID NO: 4411 - protein, 7 aa, synthetic construct
EINPIDR

SEQ ID NO: 4412 - protein, 7 aa, synthetic construct
TSHNNSV

SEQ ID NO: 4413 - protein, 7 aa, synthetic construct
KRNTTDN

SEQ ID NO: 4414 - protein, 7 aa, synthetic construct
EHDASIN

SEQ ID NO: 4415 - protein, 7 aa, synthetic construct
TGERNQV

SEQ ID NO: 4416 - protein, 7 aa, synthetic construct
SQINTRE

SEQ ID NO: 4417 - protein, 7 aa, synthetic construct
VIKDREL

SEQ ID NO: 4418 - protein, 7 aa, synthetic construct
TLMHNSS

SEQ ID NO: 4419 - protein, 7 aa, synthetic construct
PENNKID

SEQ ID NO: 4420 - protein, 7 aa, synthetic construct
LHLTENR

SEQ ID NO: 4421 - protein, 7 aa, synthetic construct
SGSQNTR

SEQ ID NO: 4422 - protein, 7 aa, synthetic construct
EQKGLLI

SEQ ID NO: 4423 - protein, 7 aa, synthetic construct
KKDVMNL

SEQ ID NO: 4424 - protein, 7 aa, synthetic construct
TITPSSS

SEQ ID NO: 4425 - protein, 7 aa, synthetic construct
QVGSSTA

SEQ ID NO: 4426 - protein, 7 aa, synthetic construct
VRASGTH

SEQ ID NO: 4427 - protein, 7 aa, synthetic construct
NAVGTKT

SEQ ID NO: 4428 - protein, 7 aa, synthetic construct
SESRHED

SEQ ID NO: 4429 - protein, 7 aa, synthetic construct
VAYKAPS

SEQ ID NO: 4430 - protein, 7 aa, synthetic construct
KDTGSEV

SEQ ID NO: 4431 - protein, 7 aa, synthetic construct
ESEVKRE

SEQ ID NO: 4432 - protein, 7 aa, synthetic construct
RSSTTPT

SEQ ID NO: 4433 - protein, 7 aa, synthetic construct
VIGAHSV

SEQ ID NO: 4434 - protein, 7 aa, synthetic construct
PYDSPTS

SEQ ID NO: 4435 - protein, 7 aa, synthetic construct
SESRPAD

SEQ ID NO: 4436 - protein, 7 aa, synthetic construct
PVSSANL

SEQ ID NO: 4437 - protein, 7 aa, synthetic construct
VKDYGAL

SEQ ID NO: 4438 - protein, 7 aa, synthetic construct
SRSESPQ

SEQ ID NO: 4439 - protein, 7 aa, synthetic construct
LRERDVY

SEQ ID NO: 4440 - protein, 7 aa, synthetic construct
AKYNGSL

SEQ ID NO: 4441 - protein, 7 aa, synthetic construct
PYNHPSS

SEQ ID NO: 4442 - protein, 7 aa, synthetic construct
GTNSELV

SEQ ID NO: 4443 - protein, 7 aa, synthetic construct
KENGVDK

SEQ ID NO: 4444 - protein, 7 aa, synthetic construct
LVHGNVA

SEQ ID NO: 4445 - protein, 7 aa, synthetic construct
NGLAVHS

SEQ ID NO: 4446 - protein, 7 aa, synthetic construct
NILINTV

SEQ ID NO: 4447 - protein, 7 aa, synthetic construct
KVVTSAM

SEQ ID NO: 4448 - protein, 7 aa, synthetic construct
VIGMAVK

SEQ ID NO: 4449 - protein, 7 aa, synthetic construct
SRSESTQ

SEQ ID NO: 4450 - protein, 7 aa, synthetic construct
ADERGQL

SEQ ID NO: 4451 - protein, 7 aa, synthetic construct
MSQKTSL

SEQ ID NO: 4452 - protein, 7 aa, synthetic construct
SESRQDD

SEQ ID NO: 4453 - protein, 7 aa, synthetic construct
DSEKRDL

SEQ ID NO: 4454 - protein, 7 aa, synthetic construct
SERRQED

SEQ ID NO: 4455 - protein, 7 aa, synthetic construct
ASPNNSE

SEQ ID NO: 4456 - protein, 7 aa, synthetic construct
RQSVNSG

SEQ ID NO: 4457 - protein, 7 aa, synthetic construct
GSRAEDM

SEQ ID NO: 4458 - protein, 7 aa, synthetic construct
RMTRDDT

SEQ ID NO: 4459 - protein, 7 aa, synthetic construct
GLTGYTH

SEQ ID NO: 4460 - protein, 7 aa, synthetic construct
AHERGQL

SEQ ID NO: 4461 - protein, 7 aa, synthetic construct
LVIHTEI

SEQ ID NO: 4462 - protein, 7 aa, synthetic construct
AKAPVTG

SEQ ID NO: 4463 - protein, 7 aa, synthetic construct
GESASVQ

SEQ ID NO: 4464 - protein, 7 aa, synthetic construct
ISEKISR

SEQ ID NO: 4465 - protein, 7 aa, synthetic construct
KDPRSAV

SEQ ID NO: 4466 - protein, 7 aa, synthetic construct
DSKVRMD

SEQ ID NO: 4467 - protein, 7 aa, synthetic construct
VQKGHLI

SEQ ID NO: 4468 - protein, 7 aa, synthetic construct
VVPGLYT

SEQ ID NO: 4469 - protein, 7 aa, synthetic construct
AKATETG

SEQ ID NO: 4470 - protein, 7 aa, synthetic construct
LVDQKSV

SEQ ID NO: 4471 - protein, 7 aa, synthetic construct
AVTARVQ

SEQ ID NO: 4472 - protein, 7 aa, synthetic construct
SGAIGGL

SEQ ID NO: 4473 - protein, 7 aa, synthetic construct
EIVNGGR

SEQ ID NO: 4474 - protein, 7 aa, synthetic construct
VNIGNGF

SEQ ID NO: 4475 - protein, 7 aa, synthetic construct
AMNVIEG

SEQ ID NO: 4476 - protein, 7 aa, synthetic construct
RLVQNED

SEQ ID NO: 4477 - protein, 7 aa, synthetic construct
DYMSRGI

SEQ ID NO: 4478 - protein, 7 aa, synthetic construct
PYNNPSS

SEQ ID NO: 4479 - protein, 7 aa, synthetic construct
AATGIKL

SEQ ID NO: 4480 - protein, 7 aa, synthetic construct
GVNKTLH

SEQ ID NO: 4481 - protein, 7 aa, synthetic construct
GERKGHE

SEQ ID NO: 4482 - protein, 7 aa, synthetic construct
NQTGSRG

SEQ ID NO: 4483 - protein, 7 aa, synthetic construct
GVYQDMR

SEQ ID NO: 4484 - protein, 7 aa, synthetic construct
PKPETVM

SEQ ID NO: 4485 - protein, 7 aa, synthetic construct
PRVDVNL

SEQ ID NO: 4486 - protein, 7 aa, synthetic construct
RNQNNSQ

SEQ ID NO: 4487 - protein, 7 aa, synthetic construct
SVSLTKT

SEQ ID NO: 4488 - protein, 7 aa, synthetic construct
NNSEGNR

SEQ ID NO: 4489 - protein, 7 aa, synthetic construct
VNIGNGL

SEQ ID NO: 4490 - protein, 7 aa, synthetic construct
LLDKSTA

SEQ ID NO: 4491 - protein, 7 aa, synthetic construct
GYGDNQH

SEQ ID NO: 4492 - protein, 7 aa, synthetic construct
ASLEPSR

SEQ ID NO: 4493 - protein, 7 aa, synthetic construct
ASQEPYS

SEQ ID NO: 4494 - protein, 7 aa, synthetic construct
QIRGKET

SEQ ID NO: 4495 - protein, 7 aa, synthetic construct
VSNVRMD

SEQ ID NO: 4496 - protein, 6 aa, synthetic construct
VKVGAL

SEQ ID NO: 4497 - protein, 7 aa, synthetic construct
VSYKALS

SEQ ID NO: 4498 - protein, 7 aa, synthetic construct
MIGLSSA

SEQ ID NO: 4499 - protein, 7 aa, synthetic construct
SSKPGSY

SEQ ID NO: 4500 - protein, 7 aa, synthetic construct
KIGLISA

SEQ ID NO: 4501 - protein, 7 aa, synthetic construct
PNNLPRS

SEQ ID NO: 4502 - protein, 7 aa, synthetic construct
MVKIETG

SEQ ID NO: 4503 - protein, 7 aa, synthetic construct
RTTNSDI

SEQ ID NO: 4504 - protein, 7 aa, synthetic construct
SRGNIQS

SEQ ID NO: 4505 - protein, 7 aa, synthetic construct
TSSPPVN

SEQ ID NO: 4506 - protein, 7 aa, synthetic construct
KHIKDGT

SEQ ID NO: 4507 - protein, 7 aa, synthetic construct
RSAPNMD

SEQ ID NO: 4508 - protein, 7 aa, synthetic construct
GKMNVHS

SEQ ID NO: 4509 - protein, 7 aa, synthetic construct
EPGVKRE

SEQ ID NO: 4510 - protein, 7 aa, synthetic construct
DVENPGQ

SEQ ID NO: 4511 - protein, 7 aa, synthetic construct
NDFGHVV

SEQ ID NO: 4512 - protein, 7 aa, synthetic construct
PTRGKNV

SEQ ID NO: 4513 - protein, 7 aa, synthetic construct
LVDQISV

SEQ ID NO: 4514 - protein, 7 aa, synthetic construct
PYNLTTS

SEQ ID NO: 4515 - protein, 7 aa, synthetic construct
GNGTRSP

SEQ ID NO: 4516 - protein, 7 aa, synthetic construct
GLMTKIS

SEQ ID NO: 4517 - protein, 7 aa, synthetic construct
GNMQTQN

SEQ ID NO: 4518 - protein, 7 aa, synthetic construct
SWGNNQT

SEQ ID NO: 4519 - protein, 7 aa, synthetic construct
TSPNDSE

SEQ ID NO: 4520 - protein, 7 aa, synthetic construct
IDRFESS

SEQ ID NO: 4521 - protein, 7 aa, synthetic construct
VRISDHI

SEQ ID NO: 4522 - protein, 7 aa, synthetic construct
GSKLATP

SEQ ID NO: 4523 - protein, 7 aa, synthetic construct
VFESYAD

SEQ ID NO: 4524 - protein, 7 aa, synthetic construct
NREDFNH

SEQ ID NO: 4525 - protein, 7 aa, synthetic construct
SGVSDGR

SEQ ID NO: 4526 - protein, 7 aa, synthetic construct
SRSERTQ

SEQ ID NO: 4527 - protein, 7 aa, synthetic construct
DVVNPGK

SEQ ID NO: 4528 - protein, 7 aa, synthetic construct
GSVEHMK

SEQ ID NO: 4529 - protein, 7 aa, synthetic construct
GLPQKMM

SEQ ID NO: 4530 - protein, 7 aa, synthetic construct
PVGVHIK

SEQ ID NO: 4531 - protein, 7 aa, synthetic construct
GLMSKIT

SEQ ID NO: 4532 - protein, 7 aa, synthetic construct
GVENPGK

SEQ ID NO: 4533 - protein, 7 aa, synthetic construct
VSATGTH

SEQ ID NO: 4534 - protein, 7 aa, synthetic construct
LVKDVNQ

SEQ ID NO: 4535 - protein, 7 aa, synthetic construct
SRSESHQ

SEQ ID NO: 4536 - protein, 7 aa, synthetic construct
SISDNSG

SEQ ID NO: 4537 - protein, 7 aa, synthetic construct
NIMINSV

SEQ ID NO: 4538 - protein, 7 aa, synthetic construct
GLQLDVS

SEQ ID NO: 4539 - protein, 7 aa, synthetic construct
EIKPNDR

SEQ ID NO: 4540 - protein, 7 aa, synthetic construct
SGGNNSV

SEQ ID NO: 4541 - protein, 7 aa, synthetic construct
AFGALKM

SEQ ID NO: 4542 - protein, 7 aa, synthetic construct
GNEDNQQ

SEQ ID NO: 4543 - protein, 7 aa, synthetic construct
VKVYGAM

SEQ ID NO: 4544 - protein, 6 aa, synthetic construct
LDKWTA

SEQ ID NO: 4545 - protein, 7 aa, synthetic construct
GMAIVQN

SEQ ID NO: 4546 - protein, 7 aa, synthetic construct
MISRVTT

SEQ ID NO: 4547 - protein, 7 aa, synthetic construct
GKQGEIP

SEQ ID NO: 4548 - protein, 7 aa, synthetic construct
KSDSHQY

SEQ ID NO: 4549 - protein, 7 aa, synthetic construct
PYDSHTS

SEQ ID NO: 4550 - protein, 7 aa, synthetic construct
SGAMGAL

SEQ ID NO: 4551 - protein, 7 aa, synthetic construct
MIEAPAV

SEQ ID NO: 4552 - protein, 7 aa, synthetic construct
EPQAQAK

SEQ ID NO: 4553 - protein, 7 aa, synthetic construct
RNAPNMD

SEQ ID NO: 4554 - protein, 7 aa, synthetic construct
RHDNSNM

SEQ ID NO: 4555 - protein, 7 aa, synthetic construct
VKVNGAL

SEQ ID NO: 4556 - protein, 7 aa, synthetic construct
TRISGTV

SEQ ID NO: 4557 - protein, 7 aa, synthetic construct
TYNHPSS

SEQ ID NO: 4558 - protein, 7 aa, synthetic construct
GSNKATH

SEQ ID NO: 4559 - protein, 7 aa, synthetic construct
EIYNTAQ

SEQ ID NO: 4560 - protein, 7 aa, synthetic construct
KKEKMIL

SEQ ID NO: 4561 - protein, 7 aa, synthetic construct
NRSTSDN

SEQ ID NO: 4562 - protein, 7 aa, synthetic construct
KDTGSVV

SEQ ID NO: 4563 - protein, 7 aa, synthetic construct
QIGSSTV

SEQ ID NO: 4564 - protein, 7 aa, synthetic construct
RLVHTME

SEQ ID NO: 4565 - protein, 7 aa, synthetic construct
QVMGTLN

SEQ ID NO: 4566 - protein, 7 aa, synthetic construct
GQARVPL

SEQ ID NO: 4567 - protein, 7 aa, synthetic construct
LVDQNSL

SEQ ID NO: 4568 - protein, 7 aa, synthetic construct
PPRSEVM

SEQ ID NO: 4569 - protein, 7 aa, synthetic construct
ASSVGQK

SEQ ID NO: 4570 - protein, 7 aa, synthetic construct
KLGHNYE

SEQ ID NO: 4571 - protein, 7 aa, synthetic construct
ANIEIAV

SEQ ID NO: 4572 - protein, 7 aa, synthetic construct
NKNAATG

SEQ ID NO: 4573 - protein, 7 aa, synthetic construct
GNKLQID

SEQ ID NO: 4574 - protein, 7 aa, synthetic construct
SWGNIQN

SEQ ID NO: 4575 - protein, 7 aa, synthetic construct
GVDNPDR

SEQ ID NO: 4576 - protein, 7 aa, synthetic construct
ILNGIVL

SEQ ID NO: 4577 - protein, 7 aa, synthetic construct
RSSSTPT

SEQ ID NO: 4578 - protein, 7 aa, synthetic construct
LNVTGLT

SEQ ID NO: 4579 - protein, 7 aa, synthetic construct
PARGENV

SEQ ID NO: 4580 - protein, 7 aa, synthetic construct
GKLTNMA

SEQ ID NO: 4581 - protein, 7 aa, synthetic construct
GLTPFGR

SEQ ID NO: 4582 - protein, 7 aa, synthetic construct
DFLSRGI

SEQ ID NO: 4583 - protein, 7 aa, synthetic construct
EIKPIER

SEQ ID NO: 4584 - protein, 7 aa, synthetic construct
WKETQAV

SEQ ID NO: 4585 - protein, 7 aa, synthetic construct
ETLPNMA

SEQ ID NO: 4586 - protein, 7 aa, synthetic construct
RSERTEQ

SEQ ID NO: 4587 - protein, 7 aa, synthetic construct
VDKSMVT

SEQ ID NO: 4588 - protein, 7 aa, synthetic construct
GGDNADR

SEQ ID NO: 4589 - protein, 7 aa, synthetic construct
ATRQSMT

SEQ ID NO: 4590 - protein, 7 aa, synthetic construct
IKIYGAL

SEQ ID NO: 4591 - protein, 7 aa, synthetic construct
GSVEHMM

SEQ ID NO: 4592 - protein, 7 aa, synthetic construct
EHASAAN

SEQ ID NO: 4593 - protein, 7 aa, synthetic construct
DIKPIDR

SEQ ID NO: 4594 - protein, 7 aa, synthetic construct
AKAPETA

SEQ ID NO: 4595 - protein, 7 aa, synthetic construct
NRIDSAT

SEQ ID NO: 4596 - protein, 7 aa, synthetic construct
NRNTSHN

SEQ ID NO: 4597 - protein, 7 aa, synthetic construct
QNRGMET

SEQ ID NO: 4598 - protein, 7 aa, synthetic construct
LLDKWTE

SEQ ID NO: 4599 - protein, 7 aa, synthetic construct
GLLSGLV

SEQ ID NO: 4600 - protein, 7 aa, synthetic construct
SGVMGGL

SEQ ID NO: 4601 - protein, 7 aa, synthetic construct
SMNGILI

SEQ ID NO: 4602 - protein, 7 aa, synthetic construct
NRVTAYQ

SEQ ID NO: 4603 - protein, 7 aa, synthetic construct
VNEKAKS

SEQ ID NO: 4604 - protein, 7 aa, synthetic construct
RESKQMA

SEQ ID NO: 4605 - protein, 7 aa, synthetic construct
PTRLSEG

SEQ ID NO: 4606 - protein, 7 aa, synthetic construct
EFGNTKG

SEQ ID NO: 4607 - protein, 7 aa, synthetic construct
ALGVGQK

SEQ ID NO: 4608 - protein, 7 aa, synthetic construct
RKELLDG

SEQ ID NO: 4609 - protein, 7 aa, synthetic construct
GHANSNM

SEQ ID NO: 4610 - protein, 7 aa, synthetic construct
ATSGIKL

SEQ ID NO: 4611 - protein, 7 aa, synthetic construct
EIYNTAL

SEQ ID NO: 4612 - protein, 7 aa, synthetic construct
QISGIEM

SEQ ID NO: 4613 - protein, 7 aa, synthetic construct
QGRGLIG

SEQ ID NO: 4614 - protein, 7 aa, synthetic construct
HGQPAMV

SEQ ID NO: 4615 - protein, 7 aa, synthetic construct
GFMSKIS

SEQ ID NO: 4616 - protein, 7 aa, synthetic construct
SMVKNVE

SEQ ID NO: 4617 - protein, 7 aa, synthetic construct
AKAPQTG

SEQ ID NO: 4618 - protein, 7 aa, synthetic construct
GSLNNAT

SEQ ID NO: 4619 - protein, 7 aa, synthetic construct
HATPAMV

SEQ ID NO: 4620 - protein, 7 aa, synthetic construct
TSPNNTE

SEQ ID NO: 4621 - protein, 7 aa, synthetic construct
LHGLSTA

SEQ ID NO: 4622 - protein, 7 aa, synthetic construct
GQAVKTN

SEQ ID NO: 4623 - protein, 7 aa, synthetic construct
PTRGEDV

SEQ ID NO: 4624 - protein, 7 aa, synthetic construct
TIHQVIV

SEQ ID NO: 4625 - protein, 7 aa, synthetic construct
HDKSSEN

SEQ ID NO: 4626 - protein, 7 aa, synthetic construct
GYGSSGN

SEQ ID NO: 4627 - protein, 7 aa, synthetic construct
KDPVSAV

SEQ ID NO: 4628 - protein, 7 aa, synthetic construct
SMVQNVE

SEQ ID NO: 4629 - protein, 7 aa, synthetic construct
AKAPENG

SEQ ID NO: 4630 - protein, 7 aa, synthetic construct
TDPKIQK

SEQ ID NO: 4631 - protein, 7 aa, synthetic construct
NITPSSS

SEQ ID NO: 4632 - protein, 7 aa, synthetic construct
MHDLSTA

SEQ ID NO: 4633 - protein, 7 aa, synthetic construct
MDTQHPI

SEQ ID NO: 4634 - protein, 7 aa, synthetic construct
DVKSDTE

SEQ ID NO: 4635 - protein, 7 aa, synthetic construct
EKVEKVS

SEQ ID NO: 4636 - protein, 7 aa, synthetic construct
KDEMNRV

SEQ ID NO: 4637 - protein, 7 aa, synthetic construct
MNSAKEP

SEQ ID NO: 4638 - protein, 7 aa, synthetic construct
PPYSENS

SEQ ID NO: 4639 - protein, 7 aa, synthetic construct
VGSERAI

SEQ ID NO: 4640 - protein, 7 aa, synthetic construct
SRNGITN

SEQ ID NO: 4641 - protein, 7 aa, synthetic construct
HAPPAME

SEQ ID NO: 4642 - protein, 7 aa, synthetic construct
SSEKISR

SEQ ID NO: 4643 - protein, 7 aa, synthetic construct
TNQQVIM

SEQ ID NO: 4644 - protein, 7 aa, synthetic construct
ATRQSEG

SEQ ID NO: 4645 - protein, 7 aa, synthetic construct
GMAIVED

SEQ ID NO: 4646 - protein, 7 aa, synthetic construct
VKIYGAF

SEQ ID NO: 4647 - protein, 7 aa, synthetic construct
NVVSSAM

SEQ ID NO: 4648 - protein, 7 aa, synthetic construct
QIRAMEM

SEQ ID NO: 4649 - protein, 7 aa, synthetic construct
GYEDYQH

SEQ ID NO: 4650 - protein, 7 aa, synthetic construct
QNTGRSS

SEQ ID NO: 4651 - protein, 7 aa, synthetic construct
IDRSERS

SEQ ID NO: 4652 - protein, 7 aa, synthetic construct
SESRQAH

SEQ ID NO: 4653 - protein, 7 aa, synthetic construct
FINNLKM

SEQ ID NO: 4654 - protein, 7 aa, synthetic construct
KDPGSAV

SEQ ID NO: 4655 - protein, 7 aa, synthetic construct
ADGVSKM

SEQ ID NO: 4656 - protein, 7 aa, synthetic construct
SGAMGGS

SEQ ID NO: 4657 - protein, 7 aa, synthetic construct
VIATKSI

SEQ ID NO: 4658 - protein, 7 aa, synthetic construct
EMTGLRE

SEQ ID NO: 4659 - protein, 7 aa, synthetic construct
QTSSEAR

SEQ ID NO: 4660 - protein, 7 aa, synthetic construct
GYGLSGI

SEQ ID NO: 4661 - protein, 7 aa, synthetic construct
SLNGMVL

SEQ ID NO: 4662 - protein, 7 aa, synthetic construct
KIHQDNM

SEQ ID NO: 4663 - protein, 7 aa, synthetic construct
DKNETKM

SEQ ID NO: 4664 - protein, 7 aa, synthetic construct
VKQGGEQ

SEQ ID NO: 4665 - protein, 7 aa, synthetic construct
ERDGYKL

SEQ ID NO: 4666 - protein, 7 aa, synthetic construct
DEGATPK

SEQ ID NO: 4667 - protein, 7 aa, synthetic construct
KDTQNLI

SEQ ID NO: 4668 - protein, 7 aa, synthetic construct
DKDGVAA

SEQ ID NO: 4669 - protein, 7 aa, synthetic construct
VFRAHSV

SEQ ID NO: 4670 - protein, 7 aa, synthetic construct
SESRQEE

SEQ ID NO: 4671 - protein, 7 aa, synthetic construct
DLSRHTL

SEQ ID NO: 4672 - protein, 7 aa, synthetic construct
GVTDRVQ

SEQ ID NO: 4673 - protein, 7 aa, synthetic construct
AHERGLL

SEQ ID NO: 4674 - protein, 7 aa, synthetic construct
GVYQNMS

SEQ ID NO: 4675 - protein, 7 aa, synthetic construct
WQLTENR

SEQ ID NO: 4676 - protein, 7 aa, synthetic construct
NRGAAYQ

SEQ ID NO: 4677 - protein, 7 aa, synthetic construct
VNKDRVL

SEQ ID NO: 4678 - protein, 7 aa, synthetic construct
HGTYGGE

SEQ ID NO: 4679 - protein, 7 aa, synthetic construct
STIEVSV

SEQ ID NO: 4680 - protein, 7 aa, synthetic construct
VKSYGEL

SEQ ID NO: 4681 - protein, 7 aa, synthetic construct
GQAPVPM

SEQ ID NO: 4682 - protein, 7 aa, synthetic construct
TGKGSEL

SEQ ID NO: 4683 - protein, 7 aa, synthetic construct
GHEDNQH

SEQ ID NO: 4684 - protein, 7 aa, synthetic construct
HGSYGVS

SEQ ID NO: 4685 - protein, 7 aa, synthetic construct
PVRSANL

SEQ ID NO: 4686 - protein, 7 aa, synthetic construct
LVNNTEI

SEQ ID NO: 4687 - protein, 7 aa, synthetic construct
NLVSSAM

SEQ ID NO: 4688 - protein, 7 aa, synthetic construct
GDAGQKD

SEQ ID NO: 4689 - protein, 7 aa, synthetic construct
GLYDQGK

SEQ ID NO: 4690 - protein, 7 aa, synthetic construct
ENASYAA

SEQ ID NO: 4691 - protein, 7 aa, synthetic construct
LVNQTEI

SEQ ID NO: 4692 - protein, 7 aa, synthetic construct
RESRQED

SEQ ID NO: 4693 - protein, 7 aa, synthetic construct
SGVSGKV

SEQ ID NO: 4694 - protein, 7 aa, synthetic construct
SLGTEFH

SEQ ID NO: 4695 - protein, 7 aa, synthetic construct
KKETMKL

SEQ ID NO: 4696 - protein, 7 aa, synthetic construct
VLSPNNV

SEQ ID NO: 4697 - protein, 7 aa, synthetic construct
LIDKWTA

SEQ ID NO: 4698 - protein, 7 aa, synthetic construct
GNEQAER

SEQ ID NO: 4699 - protein, 7 aa, synthetic construct
GIQEKAH

SEQ ID NO: 4700 - protein, 7 aa, synthetic construct
AWSVGQK

SEQ ID NO: 4701 - protein, 7 aa, synthetic construct
NGQGVYV

SEQ ID NO: 4702 - protein, 7 aa, synthetic construct
DVENPGN

SEQ ID NO: 4703 - protein, 7 aa, synthetic construct
TINPSSS

SEQ ID NO: 4704 - protein, 7 aa, synthetic construct
RRDRTEQ

SEQ ID NO: 4705 - protein, 7 aa, synthetic construct
SSLRNHS

SEQ ID NO: 4706 - protein, 7 aa, synthetic construct
LIPSVDV

SEQ ID NO: 4707 - protein, 7 aa, synthetic construct
KWTDNLE

SEQ ID NO: 4708 - protein, 7 aa, synthetic construct
GLRGEDM

SEQ ID NO: 4709 - protein, 7 aa, synthetic construct
QIASYAA

SEQ ID NO: 4710 - protein, 7 aa, synthetic construct
NTSVGKS

SEQ ID NO: 4711 - protein, 7 aa, synthetic construct
NHSGGPQ

SEQ ID NO: 4712 - protein, 7 aa, synthetic construct
TTERTAT

SEQ ID NO: 4713 - protein, 7 aa, synthetic construct
GMQGVRN

SEQ ID NO: 4714 - protein, 7 aa, synthetic construct
GNGTSNP

SEQ ID NO: 4715 - protein, 7 aa, synthetic construct
SESRKAD

SEQ ID NO: 4716 - protein, 7 aa, synthetic construct
RRESTEQ

SEQ ID NO: 4717 - protein, 7 aa, synthetic construct
GERKVHA

SEQ ID NO: 4718 - protein, 7 aa, synthetic construct
NIQRNTL

SEQ ID NO: 4719 - protein, 7 aa, synthetic construct
DVEYPGK

SEQ ID NO: 4720 - protein, 7 aa, synthetic construct
VQARVPM

SEQ ID NO: 4721 - protein, 7 aa, synthetic construct
VKEQAER

SEQ ID NO: 4722 - protein, 7 aa, synthetic construct
LNFSTLV

SEQ ID NO: 4723 - protein, 7 aa, synthetic construct
NAINRMV

SEQ ID NO: 4724 - protein, 7 aa, synthetic construct
WKETQGI

SEQ ID NO: 4725 - protein, 7 aa, synthetic construct
DYLSRGE

SEQ ID NO: 4726 - protein, 7 aa, synthetic construct
DKEMRAL

SEQ ID NO: 4727 - protein, 7 aa, synthetic construct
RVALDVQ

SEQ ID NO: 4728 - protein, 7 aa, synthetic construct
PTWGENV

SEQ ID NO: 4729 - protein, 7 aa, synthetic construct
QIRGMEP

SEQ ID NO: 4730 - protein, 7 aa, synthetic construct
SSLGNHR

SEQ ID NO: 4731 - protein, 7 aa, synthetic construct
SDSKQLD

SEQ ID NO: 4732 - protein, 7 aa, synthetic construct
VSPNYQV

SEQ ID NO: 4733 - protein, 7 aa, synthetic construct
RIGMAQA

SEQ ID NO: 4734 - protein, 7 aa, synthetic construct
ENKPIDR

SEQ ID NO: 4735 - protein, 7 aa, synthetic construct
LLNGITN

SEQ ID NO: 4736 - protein, 7 aa, synthetic construct
MLLRTDE

SEQ ID NO: 4737 - protein, 7 aa, synthetic construct
VISAKKE

SEQ ID NO: 4738 - protein, 7 aa, synthetic construct
RVAMEVQ

SEQ ID NO: 4739 - protein, 7 aa, synthetic construct
SDSRQAD

SEQ ID NO: 4740 - protein, 7 aa, synthetic construct
SGESVRA

SEQ ID NO: 4741 - protein, 7 aa, synthetic construct
PKPEAVL

SEQ ID NO: 4742 - protein, 7 aa, synthetic construct
RRERTDQ

SEQ ID NO: 4743 - protein, 7 aa, synthetic construct
GISSNTQ

SEQ ID NO: 4744 - protein, 7 aa, synthetic construct
RSSTTPP

SEQ ID NO: 4745 - protein, 7 aa, synthetic construct
VTQAQAK

SEQ ID NO: 4746 - protein, 7 aa, synthetic construct
RHANSDM

SEQ ID NO: 4747 - protein, 7 aa, synthetic construct
RTSNRDI

SEQ ID NO: 4748 - protein, 7 aa, synthetic construct
QQGISSR

SEQ ID NO: 4749 - protein, 7 aa, synthetic construct
LTKVDSA

SEQ ID NO: 4750 - protein, 7 aa, synthetic construct
PTRSENV

SEQ ID NO: 4751 - protein, 7 aa, synthetic construct
VGSESAT

SEQ ID NO: 4752 - protein, 7 aa, synthetic construct
HLVAVGV

SEQ ID NO: 4753 - protein, 7 aa, synthetic construct
QNTRGSS

SEQ ID NO: 4754 - protein, 7 aa, synthetic construct
TIHKIIM

SEQ ID NO: 4755 - protein, 7 aa, synthetic construct
NSVSHQY

SEQ ID NO: 4756 - protein, 7 aa, synthetic construct
FINNLQK

SEQ ID NO: 4757 - protein, 7 aa, synthetic construct
QKSSDAR

SEQ ID NO: 4758 - protein, 7 aa, synthetic construct
ATRLSAG

SEQ ID NO: 4759 - protein, 7 aa, synthetic construct
IDGIDPS

SEQ ID NO: 4760 - protein, 7 aa, synthetic construct
SMNGISN

SEQ ID NO: 4761 - protein, 7 aa, synthetic construct
LGKHTQI

SEQ ID NO: 4762 - protein, 7 aa, synthetic construct
NDFRHVV

SEQ ID NO: 4763 - protein, 7 aa, synthetic construct
KREDYNH

SEQ ID NO: 4764 - protein, 7 aa, synthetic construct
DQLKMRV

SEQ ID NO: 4765 - protein, 7 aa, synthetic construct
VDKSMMR

SEQ ID NO: 4766 - protein, 7 aa, synthetic construct
QRSTSGV

SEQ ID NO: 4767 - protein, 7 aa, synthetic construct
VTVGNGL

SEQ ID NO: 4768 - protein, 7 aa, synthetic construct
SRSESLK

SEQ ID NO: 4769 - protein, 7 aa, synthetic construct
LLVGTGI

SEQ ID NO: 4770 - protein, 7 aa, synthetic construct
DYMSRGV

SEQ ID NO: 4771 - protein, 7 aa, synthetic construct
EAKVYSL

SEQ ID NO: 4772 - protein, 7 aa, synthetic construct
NVLSSAM

SEQ ID NO: 4773 - protein, 7 aa, synthetic construct
LSLKTSL

SEQ ID NO: 4774 - protein, 7 aa, synthetic construct
PGSSKVS

SEQ ID NO: 4775 - protein, 7 aa, synthetic construct
GYEDNQH

SEQ ID NO: 4776 - protein, 7 aa, synthetic construct
SKVDITL

SEQ ID NO: 4777 - protein, 7 aa, synthetic construct
MVTQQLI

SEQ ID NO: 4778 - protein, 7 aa, synthetic construct
PPRSEIM

SEQ ID NO: 4779 - protein, 7 aa, synthetic construct
VLHGNVA

SEQ ID NO: 4780 - protein, 7 aa, synthetic construct
NEKEQRR

SEQ ID NO: 4781 - protein, 7 aa, synthetic construct
TSRNNSE

SEQ ID NO: 4782 - protein, 7 aa, synthetic construct
ETIGNGL

SEQ ID NO: 4783 - protein, 7 aa, synthetic construct
KVVTSDM

SEQ ID NO: 4784 - protein, 7 aa, synthetic construct
TRYSGTV

SEQ ID NO: 4785 - protein, 7 aa, synthetic construct
NHNGGRQ

SEQ ID NO: 4786 - protein, 7 aa, synthetic construct
MRNQTAI

SEQ ID NO: 4787 - protein, 7 aa, synthetic construct
ETGKAVK

SEQ ID NO: 4788 - protein, 7 aa, synthetic construct
VNNGGEK

SEQ ID NO: 4789 - protein, 7 aa, synthetic construct
GRAYAHN

SEQ ID NO: 4790 - protein, 7 aa, synthetic construct
YESRQAD

SEQ ID NO: 4791 - protein, 7 aa, synthetic construct
PTRGENM

SEQ ID NO: 4792 - protein, 7 aa, synthetic construct
TGVRNQV

SEQ ID NO: 4793 - protein, 7 aa, synthetic construct
ASQEPSR

SEQ ID NO: 4794 - protein, 7 aa, synthetic construct
GLHDQGM

SEQ ID NO: 4795 - protein, 7 aa, synthetic construct
PESSANL

SEQ ID NO: 4796 - protein, 7 aa, synthetic construct
KFGGGDF

SEQ ID NO: 4797 - protein, 7 aa, synthetic construct
TQGAESL

SEQ ID NO: 4798 - protein, 7 aa, synthetic construct
MNSDKVP

SEQ ID NO: 4799 - protein, 7 aa, synthetic construct
KSDGVAG

SEQ ID NO: 4800 - protein, 7 aa, synthetic construct
PYNVPSS

SEQ ID NO: 4801 - protein, 7 aa, synthetic construct
NLVPGLT

SEQ ID NO: 4802 - protein, 7 aa, synthetic construct
NIERTAT

SEQ ID NO: 4803 - protein, 7 aa, synthetic construct
QFASYAD

SEQ ID NO: 4804 - protein, 7 aa, synthetic construct
AKQGEIQ

SEQ ID NO: 4805 - protein, 7 aa, synthetic construct
VERAVTS

SEQ ID NO: 4806 - protein, 7 aa, synthetic construct
RVAQEVQ

SEQ ID NO: 4807 - protein, 7 aa, synthetic construct
ISVGTKS

SEQ ID NO: 4808 - protein, 7 aa, synthetic construct
DVPVIRN

SEQ ID NO: 4809 - protein, 7 aa, synthetic construct
VKHGGEQ

SEQ ID NO: 4810 - protein, 7 aa, synthetic construct
GSNMATN

SEQ ID NO: 4811 - protein, 7 aa, synthetic construct
GRASSDN

SEQ ID NO: 4812 - protein, 7 aa, synthetic construct
MGLINRQ

SEQ ID NO: 4813 - protein, 7 aa, synthetic construct
VQQAQAK

SEQ ID NO: 4814 - protein, 7 aa, synthetic construct
QRGVSSS

SEQ ID NO: 4815 - protein, 7 aa, synthetic construct
DHDASSN

SEQ ID NO: 4816 - protein, 7 aa, synthetic construct
DISAKHE

SEQ ID NO: 4817 - protein, 7 aa, synthetic construct
GMQGVSN

SEQ ID NO: 4818 - protein, 7 aa, synthetic construct
NREDYNH

SEQ ID NO: 4819 - protein, 7 aa, synthetic construct
QLASYAA

SEQ ID NO: 4820 - protein, 7 aa, synthetic construct
GGSGQKD

SEQ ID NO: 4821 - protein, 7 aa, synthetic construct
VFQREHV

SEQ ID NO: 4822 - protein, 7 aa, synthetic construct
RAREEHM

SEQ ID NO: 4823 - protein, 7 aa, synthetic construct
GERKFHE

SEQ ID NO: 4824 - protein, 7 aa, synthetic construct
GSNMATQ

SEQ ID NO: 4825 - protein, 7 aa, synthetic construct
QYASYAA

SEQ ID NO: 4826 - protein, 7 aa, synthetic construct
QFASYDA

SEQ ID NO: 4827 - protein, 7 aa, synthetic construct
AVGLSKM

SEQ ID NO: 4828 - protein, 7 aa, synthetic construct
SQGAKSL

SEQ ID NO: 4829 - protein, 7 aa, synthetic construct
SLLPGNL

SEQ ID NO: 4830 - protein, 7 aa, synthetic construct
FRIDSTT

SEQ ID NO: 4831 - protein, 7 aa, synthetic construct
GRLTETQ

SEQ ID NO: 4832 - protein, 7 aa, synthetic construct
LRGGDTP

SEQ ID NO: 4833 - protein, 7 aa, synthetic construct
VTAMAVK

SEQ ID NO: 4834 - protein, 7 aa, synthetic construct
NENEKRR

SEQ ID NO: 4835 - protein, 7 aa, synthetic construct
SGLRPQM

SEQ ID NO: 4836 - protein, 7 aa, synthetic construct
KNDTFKV

SEQ ID NO: 4837 - protein, 7 aa, synthetic construct
DANKALS

SEQ ID NO: 4838 - protein, 7 aa, synthetic construct
HVQRMTM

SEQ ID NO: 4839 - protein, 7 aa, synthetic construct
VVGAHSV

SEQ ID NO: 4840 - protein, 7 aa, synthetic construct
GRHNEIT

SEQ ID NO: 4841 - protein, 7 aa, synthetic construct
VMKIETG

SEQ ID NO: 4842 - protein, 7 aa, synthetic construct
GYGLSGS

SEQ ID NO: 4843 - protein, 7 aa, synthetic construct
DKNESTG

SEQ ID NO: 4844 - protein, 7 aa, synthetic construct
HENTKIN

SEQ ID NO: 4845 - protein, 7 aa, synthetic construct
VLRPKIV

SEQ ID NO: 4846 - protein, 7 aa, synthetic construct
NENEQQP

SEQ ID NO: 4847 - protein, 7 aa, synthetic construct
GSFHVEI

SEQ ID NO: 4848 - protein, 7 aa, synthetic construct
GRHNETS

SEQ ID NO: 4849 - protein, 7 aa, synthetic construct
RLYDQGM

SEQ ID NO: 4850 - protein, 7 aa, synthetic construct
GTRLREG

SEQ ID NO: 4851 - protein, 7 aa, synthetic construct
GLSQKMK

SEQ ID NO: 4852 - protein, 7 aa, synthetic construct
HAPPAKV

SEQ ID NO: 4853 - protein, 7 aa, synthetic construct
LVDRNSV

SEQ ID NO: 4854 - protein, 7 aa, synthetic construct
RLGHNYD

SEQ ID NO: 4855 - protein, 7 aa, synthetic construct
LTKVDSV

SEQ ID NO: 4856 - protein, 7 aa, synthetic construct
KIHQDIM

SEQ ID NO: 4857 - protein, 7 aa, synthetic construct
GLMSKIP

SEQ ID NO: 4858 - protein, 7 aa, synthetic construct
NNSEGSR

SEQ ID NO: 4859 - protein, 7 aa, synthetic construct
QRVGDTP

SEQ ID NO: 4860 - protein, 7 aa, synthetic construct
TIHNLII

SEQ ID NO: 4861 - protein, 7 aa, synthetic construct
VGATKSI

SEQ ID NO: 4862 - protein, 7 aa, synthetic construct
SYYASKT

SEQ ID NO: 4863 - protein, 7 aa, synthetic construct
NIQRNQL

SEQ ID NO: 4864 - protein, 7 aa, synthetic construct
MIQAPAM

SEQ ID NO: 4865 - protein, 7 aa, synthetic construct
VLRPNIM

SEQ ID NO: 4866 - protein, 7 aa, synthetic construct
SMIGITN

SEQ ID NO: 4867 - protein, 7 aa, synthetic construct
SGAMGGE

SEQ ID NO: 4868 - protein, 7 aa, synthetic construct
VHDSAAN

SEQ ID NO: 4869 - protein, 7 aa, synthetic construct
GLGSSRE

SEQ ID NO: 4870 - protein, 7 aa, synthetic construct
GLKLNVS

SEQ ID NO: 4871 - protein, 7 aa, synthetic construct
SPTGIKL

SEQ ID NO: 4872 - protein, 7 aa, synthetic construct
IDRFDRS

SEQ ID NO: 4873 - protein, 7 aa, synthetic construct
TGFAVHS

SEQ ID NO: 4874 - protein, 7 aa, synthetic construct
GETARDQ

SEQ ID NO: 4875 - protein, 7 aa, synthetic construct
KINQVII

SEQ ID NO: 4876 - protein, 7 aa, synthetic construct
GGAGQND

SEQ ID NO: 4877 - protein, 7 aa, synthetic construct
PPRSGFM

SEQ ID NO: 4878 - protein, 7 aa, synthetic construct
KNHQVIM

SEQ ID NO: 4879 - protein, 6 aa, synthetic construct
VKSGAL

SEQ ID NO: 4880 - protein, 7 aa, synthetic construct
PKQETVL

SEQ ID NO: 4881 - protein, 7 aa, synthetic construct
GRNMATH

SEQ ID NO: 4882 - protein, 7 aa, synthetic construct
NHNGGTQ

SEQ ID NO: 4883 - protein, 7 aa, synthetic construct
NRNTSDK

SEQ ID NO: 4884 - protein, 7 aa, synthetic construct
VISAKLQ

SEQ ID NO: 4885 - protein, 7 aa, synthetic construct
GVNSDLQ

SEQ ID NO: 4886 - protein, 7 aa, synthetic construct
YTSGFVN

SEQ ID NO: 4887 - protein, 7 aa, synthetic construct
GSFQVEM

SEQ ID NO: 4888 - protein, 7 aa, synthetic construct
TRLSGTV

SEQ ID NO: 4889 - protein, 7 aa, synthetic construct
GQARDPM

SEQ ID NO: 4890 - protein, 7 aa, synthetic construct
QQGIRSS

SEQ ID NO: 4891 - protein, 7 aa, synthetic construct
RNGMALA

SEQ ID NO: 4892 - protein, 7 aa, synthetic construct
GSNLPTP

SEQ ID NO: 4893 - protein, 7 aa, synthetic construct
TMSSADG

SEQ ID NO: 4894 - protein, 7 aa, synthetic construct
EIKTIDR

SEQ ID NO: 4895 - protein, 7 aa, synthetic construct
NENQQQR

SEQ ID NO: 4896 - protein, 7 aa, synthetic construct
EIKHIDR

SEQ ID NO: 4897 - protein, 7 aa, synthetic construct
GRASADT

SEQ ID NO: 4898 - protein, 7 aa, synthetic construct
GVSAKVQ

SEQ ID NO: 4899 - protein, 7 aa, synthetic construct
KDPGSVE

SEQ ID NO: 4900 - protein, 7 aa, synthetic construct
DQISKNI

SEQ ID NO: 4901 - protein, 7 aa, synthetic construct
IKETMKL

SEQ ID NO: 4902 - protein, 7 aa, synthetic construct
EKVVKET

SEQ ID NO: 4903 - protein, 7 aa, synthetic construct
DNKAKHE

SEQ ID NO: 4904 - protein, 7 aa, synthetic construct
STSNSDI

SEQ ID NO: 4905 - protein, 7 aa, synthetic construct
MINRVTA

SEQ ID NO: 4906 - protein, 7 aa, synthetic construct
HAPPDMV

SEQ ID NO: 4907 - protein, 7 aa, synthetic construct
GSNMATP

SEQ ID NO: 4908 - protein, 7 aa, synthetic construct
TINQVIN

SEQ ID NO: 4909 - protein, 7 aa, synthetic construct
RLNHMDT

SEQ ID NO: 4910 - protein, 7 aa, synthetic construct
ERDGNKL

SEQ ID NO: 4911 - protein, 7 aa, synthetic construct
ANRLSMT

SEQ ID NO: 4912 - protein, 7 aa, synthetic construct
SDTKIHK

SEQ ID NO: 4913 - protein, 7 aa, synthetic construct
DVGNPGK

SEQ ID NO: 4914 - protein, 7 aa, synthetic construct
SSKHATY

SEQ ID NO: 4915 - protein, 7 aa, synthetic construct
RVALEVQ

SEQ ID NO: 4916 - protein, 7 aa, synthetic construct
VRASAAN

SEQ ID NO: 4917 - protein, 7 aa, synthetic construct
IVTQHLI

SEQ ID NO: 4918 - protein, 7 aa, synthetic construct
SWGKIQT

SEQ ID NO: 4919 - protein, 7 aa, synthetic construct
PGSYGGG

SEQ ID NO: 4920 - protein, 7 aa, synthetic construct
SLVKNVV

SEQ ID NO: 4921 - protein, 7 aa, synthetic construct
SEKTEVL

SEQ ID NO: 4922 - protein, 7 aa, synthetic construct
PFDSPSR

SEQ ID NO: 4923 - protein, 7 aa, synthetic construct
PVGDHIE

SEQ ID NO: 4924 - protein, 7 aa, synthetic construct
QGPPAMV

SEQ ID NO: 4925 - protein, 7 aa, synthetic construct
GVHQNMR

SEQ ID NO: 4926 - protein, 7 aa, synthetic construct
EKVEKVT

SEQ ID NO: 4927 - protein, 7 aa, synthetic construct
GVNSALR

SEQ ID NO: 4928 - protein, 7 aa, synthetic construct
TSTNNSV

SEQ ID NO: 4929 - protein, 7 aa, synthetic construct
YINNLQM

SEQ ID NO: 4930 - protein, 7 aa, synthetic construct
VHASDAN

SEQ ID NO: 4931 - protein, 7 aa, synthetic construct
SESRQEH

SEQ ID NO: 4932 - protein, 7 aa, synthetic construct
LRDQTAI

SEQ ID NO: 4933 - protein, 7 aa, synthetic construct
MNSAKVT

SEQ ID NO: 4934 - protein, 7 aa, synthetic construct
GLVQNVD

SEQ ID NO: 4935 - protein, 7 aa, synthetic construct
GVYQNVR

SEQ ID NO: 4936 - protein, 7 aa, synthetic construct
GVSDRVH

SEQ ID NO: 4937 - protein, 7 aa, synthetic construct
TGLAVQS

SEQ ID NO: 4938 - protein, 7 aa, synthetic construct
PIHQVIK

SEQ ID NO: 4939 - protein, 7 aa, synthetic construct
GTIGNGF

SEQ ID NO: 4940 - protein, 7 aa, synthetic construct
VDKSMVK

SEQ ID NO: 4941 - protein, 7 aa, synthetic construct
QQGVPSS

SEQ ID NO: 4942 - protein, 7 aa, synthetic construct
QDTGGSS

SEQ ID NO: 4943 - protein, 7 aa, synthetic construct
NRFSGTV

SEQ ID NO: 4944 - protein, 7 aa, synthetic construct
VHASAAK

SEQ ID NO: 4945 - protein, 7 aa, synthetic construct
GPAVKTY

SEQ ID NO: 4946 - protein, 7 aa, synthetic construct
VQASAAN

SEQ ID NO: 4947 - protein, 7 aa, synthetic construct
RNAPNMG

SEQ ID NO: 4948 - protein, 7 aa, synthetic construct
VTVGNGI

SEQ ID NO: 4949 - protein, 7 aa, synthetic construct
EVNIKMS

SEQ ID NO: 4950 - protein, 7 aa, synthetic construct
VTIGDGL

SEQ ID NO: 4951 - protein, 7 aa, synthetic construct
GRARDDN

SEQ ID NO: 4952 - protein, 7 aa, synthetic construct
VNHGGEQ

SEQ ID NO: 4953 - protein, 7 aa, synthetic construct
VGRESAI

SEQ ID NO: 4954 - protein, 6 aa, synthetic construct
TGLAVH

SEQ ID NO: 4955 - protein, 7 aa, synthetic construct
GERKVNE

SEQ ID NO: 4956 - protein, 7 aa, synthetic construct
GSNMANH

SEQ ID NO: 4957 - protein, 7 aa, synthetic construct
FINKLQM

SEQ ID NO: 4958 - protein, 7 aa, synthetic construct
VIKDRVF

SEQ ID NO: 4959 - protein, 7 aa, synthetic construct
LKNGITN

SEQ ID NO: 4960 - protein, 7 aa, synthetic construct
FINNMQM

SEQ ID NO: 4961 - protein, 7 aa, synthetic construct
LVKNGII

SEQ ID NO: 4962 - protein, 7 aa, synthetic construct
LSKVRMD

SEQ ID NO: 4963 - protein, 7 aa, synthetic construct
SESRQAD

SEQ ID NO: 4964 - protein, 7 aa, synthetic construct
GAREEQT

SEQ ID NO: 4965 - protein, 7 aa, synthetic construct
HIVAVGV

SEQ ID NO: 4966 - protein, 7 aa, synthetic construct
LSNSPRS

SEQ ID NO: 4967 - protein, 7 aa, synthetic construct
ANIVSAV

SEQ ID NO: 4968 - protein, 7 aa, synthetic construct
SLVQNVA

SEQ ID NO: 4969 - protein, 7 aa, synthetic construct
VPKAQAK

SEQ ID NO: 4970 - protein, 7 aa, synthetic construct
GRNNDTT

SEQ ID NO: 4971 - protein, 7 aa, synthetic construct
IAVATKS

SEQ ID NO: 4972 - protein, 7 aa, synthetic construct
GCVEHTM

SEQ ID NO: 4973 - protein, 7 aa, synthetic construct
RRASADN

SEQ ID NO: 4974 - protein, 7 aa, synthetic construct
AGERNQV

SEQ ID NO: 4975 - protein, 7 aa, synthetic construct
SKAPETG

SEQ ID NO: 4976 - protein, 7 aa, synthetic construct
KRDDYNH

SEQ ID NO: 4977 - protein, 7 aa, synthetic construct
GRSSADN

SEQ ID NO: 4978 - protein, 7 aa, synthetic construct
TTPKNSE

SEQ ID NO: 4979 - protein, 7 aa, synthetic construct
STRGENV

SEQ ID NO: 4980 - protein, 7 aa, synthetic construct
SMVKKVD

SEQ ID NO: 4981 - protein, 7 aa, synthetic construct
KKQTMIL

SEQ ID NO: 4982 - protein, 7 aa, synthetic construct
QVGSSTI

SEQ ID NO: 4983 - protein, 7 aa, synthetic construct
DHDASRN

SEQ ID NO: 4984 - protein, 7 aa, synthetic construct
PSRGENE

SEQ ID NO: 4985 - protein, 7 aa, synthetic construct
GLRLNVS

SEQ ID NO: 4986 - protein, 7 aa, synthetic construct
ALSAGQK

SEQ ID NO: 4987 - protein, 7 aa, synthetic construct
LFGAHSV

SEQ ID NO: 4988 - protein, 7 aa, synthetic construct
NSGENRL

SEQ ID NO: 4989 - protein, 7 aa, synthetic construct
PRVDVNR

SEQ ID NO: 4990 - protein, 7 aa, synthetic construct
VKRYGAL

SEQ ID NO: 4991 - protein, 7 aa, synthetic construct
LHHATKE

SEQ ID NO: 4992 - protein, 7 aa, synthetic construct
KDPGSEV

SEQ ID NO: 4993 - protein, 7 aa, synthetic construct
GLSQKKT

SEQ ID NO: 4994 - protein, 7 aa, synthetic construct
RRERTEH

SEQ ID NO: 4995 - protein, 7 aa, synthetic construct
LISAKLE

SEQ ID NO: 4996 - protein, 7 aa, synthetic construct
GQERVPM

SEQ ID NO: 4997 - protein, 7 aa, synthetic construct
NMNTSDN

SEQ ID NO: 4998 - protein, 7 aa, synthetic construct
PSVDVNR

SEQ ID NO: 4999 - protein, 7 aa, synthetic construct
PRVDVNS

SEQ ID NO: 5000 - protein, 7 aa, synthetic construct
IINNLQM

SEQ ID NO: 5001 - RNA, 21 nt, synthetic construct
  source 1..21: mol_type = other RNA
gttaaggtttatggggcgttg

SEQ ID NO: 5002 - RNA, 21 nt, synthetic construct
  source 1..21: mol_type = other RNA
gttaagagttatggggcgttg

SEQ ID NO: 5003 - RNA, 21 nt, synthetic construct
  source 1..21: mol_type = other RNA
cagattcgtggtatggagacg

SEQ ID NO: 5004 - RNA, 21 nt, synthetic construct
  source 1..21: mol_type = other RNA
tcgtggggaaacatccaaacc

SEQ ID NO: 5005 - RNA, 21 nt, synthetic construct
  source 1..21: mol_type = other RNA
acccgcttctccggaacagtg

SEQ ID NO: 5006 - RNA, 21 nt, synthetic construct
  source 1..21: mol_type = other RNA
ctgatgaacggcatcaccaac

SEQ ID NO: 5007 - RNA, 21 nt, synthetic construct
  source 1..21: mol_type = other RNA
aataatactgagggtactcgg

SEQ ID NO: 5008 - RNA, 21 nt, synthetic construct
  source 1..21: mol_type = other RNA
accagccccaacaacagcgtg

SEQ ID NO: 5009 - RNA, 21 nt, synthetic construct
  source 1..21: mol_type = other RNA
agtaggtcggagagtttgcag

SEQ ID NO: 5010 - RNA, 21 nt, synthetic construct
  source 1..21: mol_type = other RNA
gttaagatttatggggcgttg

SEQ ID NO: 5011 - RNA, 21 nt, synthetic construct
  source 1..21: mol_type = other RNA
gcgagcaggatagacacgtcc

SEQ ID NO: 5012 - RNA, 21 nt, synthetic construct
  source 1..21: mol_type = other RNA
ggcagcaacatggccacccac

SEQ ID NO: 5013 - RNA, 21 nt, synthetic construct
  source 1..21: mol_type = other RNA
gtgccgcaagcacaggcgaag

SEQ ID NO: 5014 - RNA, 21 nt, synthetic construct
  source 1..21: mol_type = other RNA
gtcgcatacaaatccttgtca

SEQ ID NO: 5015 - RNA, 21 nt, synthetic construct
  source 1..21: mol_type = other RNA
gactacctgagcagaggcgtg

SEQ ID NO: 5016 - RNA, 21 nt, synthetic construct
  source 1..21: mol_type = other RNA
caacaaggcataagcagtagc

SEQ ID NO: 5017 - RNA, 21 nt, synthetic construct
  source 1..21: mol_type = other RNA
gcgcgtcattcggctgatggt

SEQ ID NO: 5018 - RNA, 21 nt, synthetic construct
  source 1..21: mol_type = other RNA
gtgaccatcggcaacggcctg

SEQ ID NO: 5019 - RNA, 21 nt, synthetic construct
  source 1..21: mol_type = other RNA
tttattaataatttgcagatg

SEQ ID NO: 5020 - RNA, 21 nt, synthetic construct
  source 1..21: mol_type = other RNA
gtgcacgccagcgccgccaac

SEQ ID NO: 5021 - RNA, 21 nt, synthetic construct
  source 1..21: mol_type = other RNA
aacgagaacgagcagagaaga

SEQ ID NO: 5022 - RNA, 21 nt, synthetic construct
  source 1..21: mol_type = other RNA
gtcaccgtcggcaacggcttc

SEQ ID NO: 5023 - RNA, 21 nt, synthetic construct
  source 1..21: mol_type = other RNA
atgaatagtgctaaggtgccg

SEQ ID NO: 5024 - RNA, 21 nt, synthetic construct
  source 1..21: mol_type = other RNA
cagttcgccagctacgccgcc

SEQ ID NO: 5025 - RNA, 21 nt, synthetic construct
  source 1..21: mol_type = other RNA
agtggtttgggtaataatagt

SEQ ID NO: 5026 - RNA, 21 nt, synthetic construct
  source 1..21: mol_type = other RNA
caggtgggcagcagcaccttc

SEQ ID NO: 5027 - RNA, 21 nt, synthetic construct
  source 1..21: mol_type = other RNA
accggcctgagcggcaaggtg

SEQ ID NO: 5028 - RNA, 21 nt, synthetic construct
  source 1..21: mol_type = other RNA
atccttaacgggatggtcctg

SEQ ID NO: 5029 - RNA, 21 nt, synthetic construct
  source 1..21: mol_type = other RNA
gtgaccgccaccaagagcatc

SEQ ID NO: 5030 - RNA, 21 nt, synthetic construct
  source 1..21: mol_type = other RNA
agcagcaagcccgccacctac

SEQ ID NO: 5031 - RNA, 21 nt, synthetic construct
  source 1..21: mol_type = other RNA
ggctccttccacgtcgaaatg

SEQ ID NO: 5032 - RNA, 21 nt, synthetic construct
  source 1..21: mol_type = other RNA
tctaagagtaatgggacgctt

SEQ ID NO: 5033 - RNA, 21 nt, synthetic construct
  source 1..21: mol_type = other RNA
ggcatggccatcgtcgaaaac

SEQ ID NO: 5034 - RNA, 21 nt, synthetic construct
  source 1..21: mol_type = other RNA
gtcacaataggcaacggctac

SEQ ID NO: 5035 - RNA, 21 nt, synthetic construct
  source 1..21: mol_type = other RNA
ggttatgatcataagagttct

SEQ ID NO: 5036 - RNA, 21 nt, synthetic construct
  source 1..21: mol_type = other RNA
tccgactccaaacaactcgcc

SEQ ID NO: 5037 - RNA, 21 nt, synthetic construct
  source 1..21: mol_type = other RNA
aaagacccagggtccgtcgta

SEQ ID NO: 5038 - RNA, 21 nt, synthetic construct
  source 1..21: mol_type = other RNA
ccggagaaaactaagattgat

SEQ ID NO: 5039 - RNA, 21 nt, synthetic construct
  source 1..21: mol_type = other RNA
agactgggccacagcatggac

SEQ ID NO: 5040 - RNA, 21 nt, synthetic construct
  source 1..21: mol_type = other RNA
gggacgcgtcttagtgagggg

SEQ ID NO: 5041 - RNA, 21 nt, synthetic construct
  source 1..21: mol_type = other RNA
caggttgtgtcgtctactgtt

SEQ ID NO: 5042 - RNA, 21 nt, synthetic construct
  source 1..21: mol_type = other RNA
ggactctcacaaaaaatgacc

SEQ ID NO: 5043 - RNA, 21 nt, synthetic construct
  source 1..21: mol_type = other RNA
ttacttgacaaatggacagca

SEQ ID NO: 5044 - RNA, 21 nt, synthetic construct
  source 1..21: mol_type = other RNA
aagaaggagacgatgattttg

SEQ ID NO: 5045 - RNA, 21 nt, synthetic construct
  source 1..21: mol_type = other RNA
agaaacgcccccaacatcgac

SEQ ID NO: 5046 - RNA, 21 nt, synthetic construct
  source 1..21: mol_type = other RNA
tctatggtcaaaaacgtcgac

SEQ ID NO: 5047 - RNA, 21 nt, synthetic construct
  source 1..21: mol_type = other RNA
ggcagagccagcgccgacaac

SEQ ID NO: 5048 - RNA, 21 nt, synthetic construct
  source 1..21: mol_type = other RNA
cacgcccctcctgctatggtg

SEQ ID NO: 5049 - RNA, 21 nt, synthetic construct
  source 1..21: mol_type = other RNA
gagattaagcctattgatcgt

SEQ ID NO: 5050 - RNA, 21 nt, synthetic construct
  source 1..21: mol_type = other RNA
ctgcattatttgtctactgcg

SEQ ID NO: 5051 - RNA, 21 nt, synthetic construct
  source 1..21: mol_type = other RNA
agcctggtgcagaacgtggtg

SEQ ID NO: 5052 - RNA, 21 nt, synthetic construct
  source 1..21: mol_type = other RNA
tccagccttggaaaccacagc

SEQ ID NO: 5053 - RNA, 21 nt, synthetic construct
  source 1..21: mol_type = other RNA
aatggtaaggggattgagttg

SEQ ID NO: 5054 - RNA, 21 nt, synthetic construct
  source 1..21: mol_type = other RNA
caaaacaccgggggaagctct

SEQ ID NO: 5055 - RNA, 21 nt, synthetic construct
  source 1..21: mol_type = other RNA
gagaccgccaccaagagcatc

SEQ ID NO: 5056 - RNA, 21 nt, synthetic construct
  source 1..21: mol_type = other RNA
aggtcgccgaataatagtgag

SEQ ID NO: 5057 - RNA, 21 nt, synthetic construct
  source 1..21: mol_type = other RNA
ccccagagcatcaacagcggc

SEQ ID NO: 5058 - RNA, 21 nt, synthetic construct
  source 1..21: mol_type = other RNA
cccgagaacaccaagatcaac

SEQ ID NO: 5059 - RNA, 21 nt, synthetic construct
  source 1..21: mol_type = other RNA
agaagagacctgctggacggc

SEQ ID NO: 5060 - RNA, 21 nt, synthetic construct
  source 1..21: mol_type = other RNA
agaaccagcaacagcgacatc

SEQ ID NO: 5061 - RNA, 21 nt, synthetic construct
  source 1..21: mol_type = other RNA
gatgtggagaatcgtgggaag

SEQ ID NO: 5062 - RNA, 21 nt, synthetic construct
  source 1..21: mol_type = other RNA
gccccgagtggaatcaaactc

SEQ ID NO: 5063 - RNA, 21 nt, synthetic construct
  source 1..21: mol_type = other RNA
ctggttaaggatgcgactcag

SEQ ID NO: 5064 - RNA, 21 nt, synthetic construct
  source 1..21: mol_type = other RNA
ggaataatccaaacccaaaac

SEQ ID NO: 5065 - RNA, 21 nt, synthetic construct
  source 1..21: mol_type = other RNA
gagaaggtggtgaaggtgacc

SEQ ID NO: 5066 - RNA, 21 nt, synthetic construct
  source 1..21: mol_type = other RNA
ggctacgtgctgaagaccagc

SEQ ID NO: 5067 - RNA, 21 nt, synthetic construct
  source 1..21: mol_type = other RNA
atggtgacccagcacctgatc

SEQ ID NO: 5068 - RNA, 21 nt, synthetic construct
  source 1..21: mol_type = other RNA
agcgaccccaagatccacaag

SEQ ID NO: 5069 - RNA, 21 nt, synthetic construct
  source 1..21: mol_type = other RNA
tggaaagaaacccaaggggac

SEQ ID NO: 5070 - RNA, 21 nt, synthetic construct
  source 1..21: mol_type = other RNA
agcagagacgacaccatcagc

SEQ ID NO: 5071 - RNA, 21 nt, synthetic construct
  source 1..21: mol_type = other RNA
ggcgagtaccagaacatgaga

SEQ ID NO: 5072 - RNA, 21 nt, synthetic construct
  source 1..21: mol_type = other RNA
aagctgggccacaactacggc

SEQ ID NO: 5073 - RNA, 21 nt, synthetic construct
  source 1..21: mol_type = other RNA
cggagagagaggacggagcag

SEQ ID NO: 5074 - RNA, 21 nt, synthetic construct
  source 1..21: mol_type = other RNA
accatccacaacgtgatcatc

SEQ ID NO: 5075 - RNA, 21 nt, synthetic construct
  source 1..21: mol_type = other RNA
ggtcttgggagtactcgtgag

SEQ ID NO: 5076 - RNA, 21 nt, synthetic construct
  source 1..21: mol_type = other RNA
aggctcaaccaccttgacacc

SEQ ID NO: 5077 - RNA, 21 nt, synthetic construct
  source 1..21: mol_type = other RNA
actggtaaggggattgagtcg

SEQ ID NO: 5078 - RNA, 21 nt, synthetic construct
  source 1..21: mol_type = other RNA
caggttgggtcgcctactgtt

SEQ ID NO: 5079 - RNA, 21 nt, synthetic construct
  source 1..21: mol_type = other RNA
ctgagagtgggcgacaccctg

SEQ ID NO: 5080 - RNA, 21 nt, synthetic construct
  source 1..21: mol_type = other RNA
gacaaaaacgccgccaccgcc

SEQ ID NO: 5081 - RNA, 21 nt, synthetic construct
  source 1..21: mol_type = other RNA
ggtgctcgtgaggagcatacg

SEQ ID NO: 5082 - RNA, 21 nt, synthetic construct
  source 1..21: mol_type = other RNA
ttgcgggtgggttcgggtatt

SEQ ID NO: 5083 - RNA, 21 nt, synthetic construct
  source 1..21: mol_type = other RNA
agtttgagtttgcagatgaaa

SEQ ID NO: 5084 - RNA, 21 nt, synthetic construct
  source 1..21: mol_type = other RNA
cagatcagaggcatggagatc

SEQ ID NO: 5085 - RNA, 21 nt, synthetic construct
  source 1..21: mol_type = other RNA
cttacgcggggtgagaatgtg

SEQ ID NO: 5086 - RNA, 21 nt, synthetic construct
  source 1..21: mol_type = other RNA
cccaccagaggcgagaacgag

SEQ ID NO: 5087 - RNA, 21 nt, synthetic construct
  source 1..21: mol_type = other RNA
cggagtttgactacgcagact

SEQ ID NO: 5088 - RNA, 21 nt, synthetic construct
  source 1..21: mol_type = other RNA
aacagcggcgacaacagactg

SEQ ID NO: 5089 - RNA, 21 nt, synthetic construct
  source 1..21: mol_type = other RNA
ctgaaggagcccatgatgctg

SEQ ID NO: 5090 - RNA, 21 nt, synthetic construct
  source 1..21: mol_type = other RNA
gtgaccatcgtgaacggcatc

SEQ ID NO: 5091 - RNA, 21 nt, synthetic construct
  source 1..21: mol_type = other RNA
aacagaaacaccgccgacaac

SEQ ID NO: 5092 - RNA, 21 nt, synthetic construct
  source 1..21: mol_type = other RNA
agcggcggcagcgagggcaga

SEQ ID NO: 5093 - RNA, 21 nt, synthetic construct
  source 1..21: mol_type = other RNA
ggagtcatgcaaacccaaaac

SEQ ID NO: 5094 - RNA, 21 nt, synthetic construct
  source 1..21: mol_type = other RNA
gacaaggctaacctacacacc

SEQ ID NO: 5095 - RNA, 21 nt, synthetic construct
  source 1..21: mol_type = other RNA
ggcgtgagcaagaccctgctg

SEQ ID NO: 5096 - RNA, 21 nt, synthetic construct
  source 1..21: mol_type = other RNA
gactacctgagcagaggcatc

SEQ ID NO: 5097 - RNA, 21 nt, synthetic construct
  source 1..21: mol_type = other RNA
ggcagactgaccgagacccac

SEQ ID NO: 5098 - RNA, 21 nt, synthetic construct
  source 1..21: mol_type = other RNA
cccctttccagcgccaacctc

SEQ ID NO: 5099 - RNA, 21 nt, synthetic construct
  source 1..21: mol_type = other RNA
cacataaaatcgtccgaaaca

SEQ ID NO: 5100 - RNA, 21 nt, synthetic construct
  source 1..21: mol_type = other RNA
atcagagaccagaccgccatc

SEQ ID NO: 5101 - RNA, 21 nt, synthetic construct
  source 1..21: mol_type = other RNA
gacgtgaagagcagcgagacc

SEQ ID NO: 5102 - RNA, 21 nt, synthetic construct
  source 1..21: mol_type = other RNA
cccggctcatacggcgtctca

SEQ ID NO: 5103 - RNA, 21 nt, synthetic construct
  source 1..21: mol_type = other RNA
caaaccatcggcaacggattc

SEQ ID NO: 5104 - RNA, 21 nt, synthetic construct
  source 1..21: mol_type = other RNA
agcgtgggcctgaccaagatc

SEQ ID NO: 5105 - RNA, 21 nt, synthetic construct
  source 1..21: mol_type = other RNA
atgaaagacaaaatgatactt

SEQ ID NO: 5106 - RNA, 21 nt, synthetic construct
  source 1..21: mol_type = other RNA
aaagacccgggaagcgctgcc

SEQ ID NO: 5107 - RNA, 21 nt, synthetic construct
  source 1..21: mol_type = other RNA
agcaagcccgagaccgtgctg

SEQ ID NO: 5108 - RNA, 21 nt, synthetic construct
  source 1..21: mol_type = other RNA
tctcagggggctgagtcgatt

SEQ ID NO: 5109 - RNA, 21 nt, synthetic construct
  source 1..21: mol_type = other RNA
aaccacaccgagagcagaggc

SEQ ID NO: 5110 - RNA, 21 nt, synthetic construct
  source 1..21: mol_type = other RNA
tcggaacccggcgttagcgtt

SEQ ID NO: 5111 - RNA, 21 nt, synthetic construct
  source 1..21: mol_type = other RNA
agcgagagaagacaggccgac

SEQ ID NO: 5112 - RNA, 21 nt, synthetic construct
  source 1..21: mol_type = other RNA
tccggcctttccggaaaaatg

SEQ ID NO: 5113 - RNA, 21 nt, synthetic construct
  source 1..21: mol_type = other RNA
ctggggagtgagagtgcgatt

SEQ ID NO: 5114 - RNA, 21 nt, synthetic construct
  source 1..21: mol_type = other RNA
atgagagaccagaccgccatc

SEQ ID NO: 5115 - RNA, 21 nt, synthetic construct
  source 1..21: mol_type = other RNA
gggccggcgggtaagacgaat

SEQ ID NO: 5116 - RNA, 21 nt, synthetic construct
  source 1..21: mol_type = other RNA
aatcagacggagtcgcggggg

SEQ ID NO: 5117 - RNA, 21 nt, synthetic construct
  source 1..21: mol_type = other RNA
cggacctccaacggcgacatc

SEQ ID NO: 5118 - RNA, 21 nt, synthetic construct
  source 1..21: mol_type = other RNA
aaaggactgatcaaccaacaa

SEQ ID NO: 5119 - RNA, 21 nt, synthetic construct
  source 1..21: mol_type = other RNA
ggaaacgtgctcaaaagcagc

SEQ ID NO: 5120 - DNA, 21 bp, synthetic construct
  source 1..21: mol_type = other DNA
ggatacgtgatcaagagcagc

SEQ ID NO: 5121 - RNA, 21 nt, synthetic construct
  source 1..21: mol_type = other RNA
atgaaccagaacaacacccag

SEQ ID NO: 5122 - RNA, 21 nt, synthetic construct
  source 1..21: mol_type = other RNA
gtgggcagagagagagccatc

SEQ ID NO: 5123 - DNA, 21 bp, synthetic construct
  source 1..21: mol_type = other DNA
accactgccaacaactccgaa

SEQ ID NO: 5124 - RNA, 21 nt, synthetic construct
  source 1..21: mol_type = other RNA
gacaaaaacaccgctaccggc

SEQ ID NO: 5125 - RNA, 21 nt, synthetic construct
  source 1..21: mol_type = other RNA
cccgtgggcgtgcacatcggc

SEQ ID NO: 5126 - RNA, 21 nt, synthetic construct
  source 1..21: mol_type = other RNA
ggtcttgggggtactcctgag

SEQ ID NO: 5127 - RNA, 21 nt, synthetic construct
  source 1..21: mol_type = other RNA
ccaaaactcgaaaccgttctt

SEQ ID NO: 5128 - RNA, 21 nt, synthetic construct
  source 1..21: mol_type = other RNA
accggcgacagaaaccaggtg

SEQ ID NO: 5129 - RNA, 21 nt, synthetic construct
  source 1..21: mol_type = other RNA
ggcacaaacagtaaaatggtt

SEQ ID NO: 5130 - RNA, 21 nt, synthetic construct
  source 1..21: mol_type = other RNA
aactacgactactcacggacc

SEQ ID NO: 5131 - RNA, 21 nt, synthetic construct
  source 1..21: mol_type = other RNA
ccccccagaggcgagaacgtg

SEQ ID NO: 5132 - RNA, 21 nt, synthetic construct
  source 1..21: mol_type = other RNA
cttctccacactactgccaac

SEQ ID NO: 5133 - RNA, 21 nt, synthetic construct
  source 1..21: mol_type = other RNA
ggcctgaccggctacccccac

SEQ ID NO: 5134 - RNA, 21 nt, synthetic construct
  source 1..21: mol_type = other RNA
ggcctgaccagagtgagcgac

SEQ ID NO: 5135 - RNA, 21 nt, synthetic construct
  source 1..21: mol_type = other RNA
tctcagattattaagcgggag

SEQ ID NO: 5136 - RNA, 21 nt, synthetic construct
  source 1..21: mol_type = other RNA
gagaagggcaagctgatcgcc

SEQ ID NO: 5137 - RNA, 21 nt, synthetic construct
  source 1..21: mol_type = other RNA
ggtaatggtacgcataatccg

SEQ ID NO: 5138 - RNA, 21 nt, synthetic construct
  source 1..21: mol_type = other RNA
agaagagacgacaccatcttc

SEQ ID NO: 5139 - RNA, 21 nt, synthetic construct
  source 1..21: mol_type = other RNA
ctgcacgacttcagcaccgcc

SEQ ID NO: 5140 - RNA, 21 nt, synthetic construct
  source 1..21: mol_type = other RNA
aaccacaacggaggcccacct

SEQ ID NO: 5141 - RNA, 21 nt, synthetic construct
  source 1..21: mol_type = other RNA
ggcaccctgcccatcatggcc

SEQ ID NO: 5142 - RNA, 21 nt, synthetic construct
  source 1..21: mol_type = other RNA
gcactgaccgtgggacaaaaa

SEQ ID NO: 5143 - RNA, 21 nt, synthetic construct
  source 1..21: mol_type = other RNA
agcctgctgaccggctacatc

SEQ ID NO: 5144 - RNA, 21 nt, synthetic construct
  source 1..21: mol_type = other RNA
gagcacgacgccagcagaaac

SEQ ID NO: 5145 - RNA, 21 nt, synthetic construct
  source 1..21: mol_type = other RNA
ctaactgacaccaaactaccg

SEQ ID NO: 5146 - RNA, 21 nt, synthetic construct
  source 1..21: mol_type = other RNA
gcccacgacagaggccagctg

SEQ ID NO: 5147 - RNA, 21 nt, synthetic construct
  source 1..21: mol_type = other RNA
gcgacaaactctgaaaaagtt

SEQ ID NO: 5148 - RNA, 21 nt, synthetic construct
  source 1..21: mol_type = other RNA
gccagaaacgtgatcgagagc

SEQ ID NO: 5149 - RNA, 21 nt, synthetic construct
  source 1..21: mol_type = other RNA
gcggagcgtggtgtgacgtct

SEQ ID NO: 5150 - RNA, 21 nt, synthetic construct
  source 1..21: mol_type = other RNA
ggcaacggcaccagaaacacc

SEQ ID NO: 5151 - RNA, 21 nt, synthetic construct
  source 1..21: mol_type = other RNA
cggagtgtgacgacggagcag

SEQ ID NO: 5152 - RNA, 21 nt, synthetic construct
  source 1..21: mol_type = other RNA
cccctggtggccgtgggcgtg

SEQ ID NO: 5153 - RNA, 21 nt, synthetic construct
  source 1..21: mol_type = other RNA
cccggcagagagacccccacc

SEQ ID NO: 5154 - RNA, 21 nt, synthetic construct
  source 1..21: mol_type = other RNA
ctgctgaaaaacggactgatc

SEQ ID NO: 5155 - RNA, 21 nt, synthetic construct
  source 1..21: mol_type = other RNA
aagaaggagaccatcatcctg

SEQ ID NO: 5156 - RNA, 21 nt, synthetic construct
  source 1..21: mol_type = other RNA
gtggggagtaagagtgcgatt

SEQ ID NO: 5157 - RNA, 21 nt, synthetic construct
  source 1..21: mol_type = other RNA
gcgttgagtgttggtcagaag

SEQ ID NO: 5158 - RNA, 21 nt, synthetic construct
  source 1..21: mol_type = other RNA
acacgtaacgtaatcgaagga

SEQ ID NO: 5159 - RNA, 21 nt, synthetic construct
  source 1..21: mol_type = other RNA
ctggtgaaggacctgacccag

SEQ ID NO: 5160 - RNA, 21 nt, synthetic construct
  source 1..21: mol_type = other RNA
ggcagacacaacgagaccccc

SEQ ID NO: 5161 - RNA, 21 nt, synthetic construct
  source 1..21: mol_type = other RNA
aaatggtccgtgaacctcgaa

SEQ ID NO: 5162 - RNA, 21 nt, synthetic construct
  source 1..21: mol_type = other RNA
atgaaggagaccctgatgctg

SEQ ID NO: 5163 - RNA, 21 nt, synthetic construct
  source 1..21: mol_type = other RNA
aacgaagtaggcaccaaatca

SEQ ID NO: 5164 - RNA, 21 nt, synthetic construct
  source 1..21: mol_type = other RNA
cctatgaacggaatcaccaac

SEQ ID NO: 5165 - RNA, 21 nt, synthetic construct
  source 1..21: mol_type = other RNA
aaggccgtggacggcatcgtg

SEQ ID NO: 5166 - RNA, 21 nt, synthetic construct
  source 1..21: mol_type = other RNA
ggcgtggacaacgccggcaga

SEQ ID NO: 5167 - RNA, 21 nt, synthetic construct
  source 1..21: mol_type = other RNA
atgatgaagaccgagaccggc

SEQ ID NO: 5168 - RNA, 21 nt, synthetic construct
  source 1..21: mol_type = other RNA
aactccggggacaaccaaccc

SEQ ID NO: 5169 - RNA, 21 nt, synthetic construct
  source 1..21: mol_type = other RNA
accgaacccggcatgagcgtc

SEQ ID NO: 5170 - RNA, 21 nt, synthetic construct
  source 1..21: mol_type = other RNA
agaacctcaaactccgacaac

SEQ ID NO: 5171 - RNA, 21 nt, synthetic construct
  source 1..21: mol_type = other RNA
gtgattaaggatagggtgttg

SEQ ID NO: 5172 - RNA, 21 nt, synthetic construct
  source 1..21: mol_type = other RNA
tctggctcccaagacaccaca

SEQ ID NO: 5173 - RNA, 21 nt, synthetic construct
  source 1..21: mol_type = other RNA
cagctgagcaccgccagcacc

SEQ ID NO: 5174 - RNA, 21 nt, synthetic construct
  source 1..21: mol_type = other RNA
ggcagcctgaccgagacccag

SEQ ID NO: 5175 - RNA, 21 nt, synthetic construct
  source 1..21: mol_type = other RNA
gccagacacaacgagaccacc

SEQ ID NO: 5176 - RNA, 21 nt, synthetic construct
  source 1..21: mol_type = other RNA
ggtgagagtaaggttcatgag

SEQ ID NO: 5177 - RNA, 21 nt, synthetic construct
  source 1..21: mol_type = other RNA
gtttcaagcggaaacggcttc

SEQ ID NO: 5178 - RNA, 21 nt, synthetic construct
  source 1..21: mol_type = other RNA
gccaaggcccccggcaccggc

SEQ ID NO: 5179 - RNA, 21 nt, synthetic construct
  source 1..21: mol_type = other RNA
aagaaggagcccatgatgatg

SEQ ID NO: 5180 - RNA, 21 nt, synthetic construct
  source 1..21: mol_type = other RNA
ggaggatcccacgtcgaaatg

SEQ ID NO: 5181 - RNA, 21 nt, synthetic construct
  source 1..21: mol_type = other RNA
ggcatgcacaacgagaccacc

SEQ ID NO: 5182 - RNA, 21 nt, synthetic construct
  source 1..21: mol_type = other RNA
ggtttgtcgcagaagatgttg

SEQ ID NO: 5183 - RNA, 21 nt, synthetic construct
  source 1..21: mol_type = other RNA
agcgaatccaaacaactatcc

SEQ ID NO: 5184 - RNA, 21 nt, synthetic construct
  source 1..21: mol_type = other RNA
gtcccacaggcccaagcccaa

SEQ ID NO: 5185 - RNA, 21 nt, synthetic construct
  source 1..21: mol_type = other RNA
ggcatcaccgagaagagctac

SEQ ID NO: 5186 - RNA, 21 nt, synthetic construct
  source 1..21: mol_type = other RNA
caacgcaccacctcaggcggc

SEQ ID NO: 5187 - RNA, 21 nt, synthetic construct
  source 1..21: mol_type = other RNA
gggctctctcaaaaaatgatg

SEQ ID NO: 5188 - RNA, 21 nt, synthetic construct
  source 1..21: mol_type = other RNA
caaaccacgggaggctccctt

SEQ ID NO: 5189 - RNA, 21 nt, synthetic construct
  source 1..21: mol_type = other RNA
ggttacgaagttaaccaacac

SEQ ID NO: 5190 - RNA, 21 nt, synthetic construct
  source 1..21: mol_type = other RNA
ttgacaaaagtggacaccgtc

SEQ ID NO: 5191 - RNA, 21 nt, synthetic construct
  source 1..21: mol_type = other RNA
cccttcgacagccacaccagc

SEQ ID NO: 5192 - RNA, 21 nt, synthetic construct
  source 1..21: mol_type = other RNA
ggagccaacaaaacattgctg

SEQ ID NO: 5193 - RNA, 21 nt, synthetic construct
  source 1..21: mol_type = other RNA
gggagtctgactgagactcgt

SEQ ID NO: 5194 - RNA, 21 nt, synthetic construct
  source 1..21: mol_type = other RNA
ctggcaacctccagaggcagt

SEQ ID NO: 5195 - RNA, 21 nt, synthetic construct
  source 1..21: mol_type = other RNA
acgattcatcaggttattaat

SEQ ID NO: 5196 - RNA, 21 nt, synthetic construct
  source 1..21: mol_type = other RNA
ggcataccttggaacacccaa

SEQ ID NO: 5197 - RNA, 21 nt, synthetic construct
  source 1..21: mol_type = other RNA
ctgagagagagagacggccac

SEQ ID NO: 5198 - RNA, 21 nt, synthetic construct
  source 1..21: mol_type = other RNA
agcgagagcagacaggaggac

SEQ ID NO: 5199 - DNA, 21 bp, synthetic construct
  source 1..21: mol_type = other DNA
gtgagcaacttcgccacccac

SEQ ID NO: 5200 - RNA, 21 nt, synthetic construct
  source 1..21: mol_type = other RNA
ctgagagacggcgacaccccc

SEQ ID NO: 5201 - RNA, 21 nt, synthetic construct
  source 1..21: mol_type = other RNA
ccctacgacagccacagcagc

SEQ ID NO: 5202 - RNA, 21 nt, synthetic construct
  source 1..21: mol_type = other RNA
ggcgtacttcacatcgcatcc

SEQ ID NO: 5203 - RNA, 21 nt, synthetic construct
  source 1..21: mol_type = other RNA
cggaccagctacagcgacata

SEQ ID NO: 5204 - RNA, 21 nt, synthetic construct
  source 1..21: mol_type = other RNA
ggggttagtgcaagcgtccac

SEQ ID NO: 5205 - RNA, 21 nt, synthetic construct
  source 1..21: mol_type = other RNA
gtgcagcaggcccaggcccag

SEQ ID NO: 5206 - RNA, 21 nt, synthetic construct
  source 1..21: mol_type = other RNA
ggcagcctgatcgagacccac

SEQ ID NO: 5207 - RNA, 21 nt, synthetic construct
  source 1..21: mol_type = other RNA
ctggtcaaaaacgggcacatc

SEQ ID NO: 5208 - RNA, 21 nt, synthetic construct
  source 1..21: mol_type = other RNA
aatagtatgggtgagaggggg

SEQ ID NO: 5209 - RNA, 21 nt, synthetic construct
  source 1..21: mol_type = other RNA
accgagagcagacaggccgac

SEQ ID NO: 5210 - RNA, 21 nt, synthetic construct
  source 1..21: mol_type = other RNA
agcgaatccaaactcctcgca

SEQ ID NO: 5211 - RNA, 21 nt, synthetic construct
  source 1..21: mol_type = other RNA
atgaactccaccaaagtaacc

SEQ ID NO: 5212 - RNA, 21 nt, synthetic construct
  source 1..21: mol_type = other RNA
agagacgacagagacgccaga

SEQ ID NO: 5213 - RNA, 21 nt, synthetic construct
  source 1..21: mol_type = other RNA
agtgaaagcaggaaagaagac

SEQ ID NO: 5214 - RNA, 21 nt, synthetic construct
  source 1..21: mol_type = other RNA
ccggcattgagaccccaaatg

SEQ ID NO: 5215 - RNA, 21 nt, synthetic construct
  source 1..21: mol_type = other RNA
ggggtatccgacatggtgcaa

SEQ ID NO: 5216 - RNA, 21 nt, synthetic construct
  source 1..21: mol_type = other RNA
aggaaggagactcagggtgat

SEQ ID NO: 5217 - RNA, 21 nt, synthetic construct
  source 1..21: mol_type = other RNA
tttacgttgaaggggtctggt

SEQ ID NO: 5218 - RNA, 21 nt, synthetic construct
  source 1..21: mol_type = other RNA
atgaaagaaaccatgaaactt

SEQ ID NO: 5219 - RNA, 21 nt, synthetic construct
  source 1..21: mol_type = other RNA
cacttagtagccgacggggtc

SEQ ID NO: 5220 - RNA, 21 nt, synthetic construct
  source 1..21: mol_type = other RNA
atgatgaagattgggacgggg

SEQ ID NO: 5221 - RNA, 21 nt, synthetic construct
  source 1..21: mol_type = other RNA
ggggagatgcggtctcatgtg

SEQ ID NO: 5222 - RNA, 21 nt, synthetic construct
  source 1..21: mol_type = other RNA
gccagcaccggcatcaagctg

SEQ ID NO: 5223 - RNA, 21 nt, synthetic construct
  source 1..21: mol_type = other RNA
ctgggcacctctagagtttcc

SEQ ID NO: 5224 - RNA, 21 nt, synthetic construct
  source 1..21: mol_type = other RNA
aacgtgaagagcagcgagacc

SEQ ID NO: 5225 - RNA, 21 nt, synthetic construct
  source 1..21: mol_type = other RNA
acgtcgccgaaaaaaagtgag

SEQ ID NO: 5226 - RNA, 21 nt, synthetic construct
  source 1..21: mol_type = other RNA
tctcaaagcttcaactcaggc

SEQ ID NO: 5227 - RNA, 21 nt, synthetic construct
  source 1..21: mol_type = other RNA
accatcaaccaagtaatcaaa

SEQ ID NO: 5228 - RNA, 21 nt, synthetic construct
  source 1..21: mol_type = other RNA
ggccaggccagagtgcccatc

SEQ ID NO: 5229 - RNA, 21 nt, synthetic construct
  source 1..21: mol_type = other RNA
cccagaaacgtgatcgagggc

SEQ ID NO: 5230 - RNA, 21 nt, synthetic construct
  source 1..21: mol_type = other RNA
accggcttggcagtacactca

SEQ ID NO: 5231 - RNA, 21 nt, synthetic construct
  source 1..21: mol_type = other RNA
gccagccaggagcagaccaga

SEQ ID NO: 5232 - RNA, 21 nt, synthetic construct
  source 1..21: mol_type = other RNA
gtggtgaaccacaccgagatc

SEQ ID NO: 5233 - DNA, 21 bp, synthetic construct
  source 1..21: mol_type = other DNA
ccaggcatcctgaccgagacc

SEQ ID NO: 5234 - RNA, 21 nt, synthetic construct
  source 1..21: mol_type = other RNA
aacggattcgccgtacactca

SEQ ID NO: 5235 - RNA, 21 nt, synthetic construct
  source 1..21: mol_type = other RNA
ggcgccagagaggagcacaag

SEQ ID NO: 5236 - RNA, 21 nt, synthetic construct
  source 1..21: mol_type = other RNA
ctggttgaccaaaactccgtc

SEQ ID NO: 5237 - RNA, 21 nt, synthetic construct
  source 1..21: mol_type = other RNA
ctcaccaaaggggactctgtt

SEQ ID NO: 5238 - DNA, 21 bp, synthetic construct
  source 1..21: mol_type = other DNA
ggcagcgccagcgccgacaac

SEQ ID NO: 5239 - DNA, 21 bp, synthetic construct
  source 1..21: mol_type = other DNA
ttacttgacaaatgcacagca

SEQ ID NO: 5240 - RNA, 21 nt, synthetic construct
  source 1..21: mol_type = other RNA
gaattgtctcggcttacgctt

SEQ ID NO: 5241 - RNA, 21 nt, synthetic construct
  source 1..21: mol_type = other RNA
ggcaacaaactgcacatagac

SEQ ID NO: 5242 - DNA, 21 bp, synthetic construct
  source 1..21: mol_type = other DNA
ggcagagccagagccgacaac

SEQ ID NO: 5243 - RNA, 21 nt, synthetic construct
  source 1..21: mol_type = other RNA
ccgtataatcttcttagttct

SEQ ID NO: 5244 - RNA, 21 nt, synthetic construct
  source 1..21: mol_type = other RNA
agcaagagcaacgagaccccc

SEQ ID NO: 5245 - RNA, 21 nt, synthetic construct
  source 1..21: mol_type = other RNA
aagaatgagacgatgattttg

SEQ ID NO: 5246 - RNA, 21 nt, synthetic construct
  source 1..21: mol_type = other RNA
ggcatcatgcagacccacaac

SEQ ID NO: 5247 - DNA, 21 bp, synthetic construct
  source 1..21: mol_type = other DNA
ggcagagccagcgccgaaaac

SEQ ID NO: 5248 - DNA, 21 bp, synthetic construct
  source 1..21: mol_type = other DNA
ggcagagccagcgccgacaaa

SEQ ID NO: 5249 - DNA, 21 bp, synthetic construct
  source 1..21: mol_type = other DNA
ttacttgaaaaatggacagca

SEQ ID NO: 5250 - RNA, 21 nt, synthetic construct
  source 1..21: mol_type = other RNA
gccaccagactgagcgaggtg

SEQ ID NO: 5251 - RNA, 21 nt, synthetic construct
  source 1..21: mol_type = other RNA
ccgactgagaattcgggtgtt

SEQ ID NO: 5252 - RNA, 21 nt, synthetic construct
  source 1..21: mol_type = other RNA
gcggtgagtgttggtcagaag

SEQ ID NO: 5253 - DNA, 21 bp, synthetic construct
  source 1..21: mol_type = other DNA
aagaaggagacgatgattttt

SEQ ID NO: 5254 - RNA, 21 nt, synthetic construct
  source 1..21: mol_type = other RNA
atggatacgcagcatattatt

SEQ ID NO: 5255 - RNA, 21 nt, synthetic construct
  source 1..21: mol_type = other RNA
tcccgggtcgacgtaaaccgg

SEQ ID NO: 5256 - RNA, 21 nt, synthetic construct
  source 1..21: mol_type = other RNA
ggcgtcagcgcccgagcccaa

SEQ ID NO: 5257 - DNA, 21 bp, synthetic construct
  source 1..21: mol_type = other DNA
ttacttgacaaatagacagca

SEQ ID NO: 5258 - DNA, 21 bp, synthetic construct
  source 1..21: mol_type = other DNA
ttacttgacaaaaggacagca

SEQ ID NO: 5259 - RNA, 21 nt, synthetic construct
  source 1..21: mol_type = other RNA
ggtaacgaagacaaccaacac

SEQ ID NO: 5260 - RNA, 21 nt, synthetic construct
  source 1..21: mol_type = other RNA
agtggtgcgatgggtgggaag

SEQ ID NO: 5261 - RNA, 21 nt, synthetic construct
  source 1..21: mol_type = other RNA
agaagaagcggcctggagatg

SEQ ID NO: 5262 - RNA, 21 nt, synthetic construct
  source 1..21: mol_type = other RNA
aagtggaccctgaacctggag

SEQ ID NO: 5263 - RNA, 21 nt, synthetic construct
  source 1..21: mol_type = other RNA
cacgacaagagcaccgagacc

SEQ ID NO: 5264 - RNA, 21 nt, synthetic construct
  source 1..21: mol_type = other RNA
cttgtgagggaaggtcgggag

SEQ ID NO: 5265 - RNA, 21 nt, synthetic construct
  source 1..21: mol_type = other RNA
ggcagacacaacgagagcacc

SEQ ID NO: 5266 - RNA, 21 nt, synthetic construct
  source 1..21: mol_type = other RNA
gagaagaaccccaccgtgatg

SEQ ID NO: 5267 - RNA, 21 nt, synthetic construct
  source 1..21: mol_type = other RNA
agcggcgccatgggcggcgtg

SEQ ID NO: 5268 - DNA, 21 bp, synthetic construct
  source 1..21: mol_type = other DNA
atggagaacggcgtgaagaga

SEQ ID NO: 5269 - RNA, 21 nt, synthetic construct
  source 1..21: mol_type = other RNA
cccaacaacctgcccaccagc

SEQ ID NO: 5270 - RNA, 21 nt, synthetic construct
  source 1..21: mol_type = other RNA
agccttgtcggaagtggcatc

SEQ ID NO: 5271 - RNA, 21 nt, synthetic construct
  source 1..21: mol_type = other RNA
atggacaccaagcacctgatc

SEQ ID NO: 5272 - RNA, 21 nt, synthetic construct
  source 1..21: mol_type = other RNA
accaaccaccaggacaacaag

SEQ ID NO: 5273 - RNA, 21 nt, synthetic construct
  source 1..21: mol_type = other RNA
gtcagcgcaaccaactccatc

SEQ ID NO: 5274 - RNA, 21 nt, synthetic construct
  source 1..21: mol_type = other RNA
ggcgtgaacaacaccctgctg

SEQ ID NO: 5275 - RNA, 21 nt, synthetic construct
  source 1..21: mol_type = other RNA
aatgatcctaagattcataag

SEQ ID NO: 5276 - RNA, 21 nt, synthetic construct
  source 1..21: mol_type = other RNA
cccaccagaggcgagaacctg

SEQ ID NO: 5277 - RNA, 21 nt, synthetic construct
  source 1..21: mol_type = other RNA
ctgaccgacaccaagctgacc

SEQ ID NO: 5278 - RNA, 21 nt, synthetic construct
  source 1..21: mol_type = other RNA
ccgcagaatactaagattgat

SEQ ID NO: 5279 - RNA, 21 nt, synthetic construct
  source 1..21: mol_type = other RNA
cgtttcgaacaagtttcaaac

SEQ ID NO: 5280 - RNA, 21 nt, synthetic construct
  source 1..21: mol_type = other RNA
ggcaccaacagcgagatggag

SEQ ID NO: 5281 - RNA, 21 nt, synthetic construct
  source 1..21: mol_type = other RNA
ggtgatcctaatcgtgagaag

SEQ ID NO: 5282 - RNA, 21 nt, synthetic construct
  source 1..21: mol_type = other RNA
gatcttcgtacttctacgctg

SEQ ID NO: 5283 - RNA, 21 nt, synthetic construct
  source 1..21: mol_type = other RNA
gacgttgaaaaccccggcaaa

SEQ ID NO: 5284 - RNA, 21 nt, synthetic construct
  source 1..21: mol_type = other RNA
agtgggtctcgggatacgagg

SEQ ID NO: 5285 - RNA, 21 nt, synthetic construct
  source 1..21: mol_type = other RNA
caacaaggcgtgtcaagccca

SEQ ID NO: 5286 - RNA, 21 nt, synthetic construct
  source 1..21: mol_type = other RNA
agcgagagcaagaacctggcc

SEQ ID NO: 5287 - RNA, 21 nt, synthetic construct
  source 1..21: mol_type = other RNA
cgcttaacgcgcgacgacacc

SEQ ID NO: 5288 - RNA, 21 nt, synthetic construct
  source 1..21: mol_type = other RNA
gtgaccaaggtggacagcgtg

SEQ ID NO: 5289 - RNA, 21 nt, synthetic construct
  source 1..21: mol_type = other RNA
agggaacgagacgagaccaca

SEQ ID NO: 5290 - RNA, 21 nt, synthetic construct
  source 1..21: mol_type = other RNA
aaaaacacaaccggggtgagt

SEQ ID NO: 5291 - RNA, 21 nt, synthetic construct
  source 1..21: mol_type = other RNA
aaggtcgtttcatcggacatg

SEQ ID NO: 5292 - RNA, 21 nt, synthetic construct
  source 1..21: mol_type = other RNA
ggccccgccgtgaagaccagc

SEQ ID NO: 5293 - RNA, 21 nt, synthetic construct
  source 1..21: mol_type = other RNA
acaggaaaagaaatcgaactc

SEQ ID NO: 5294 - RNA, 21 nt, synthetic construct
  source 1..21: mol_type = other RNA
agaaccagcaacagcgagatc

SEQ ID NO: 5295 - RNA, 21 nt, synthetic construct
  source 1..21: mol_type = other RNA
gagctggacgccaccagcaag

SEQ ID NO: 5296 - RNA, 21 nt, synthetic construct
  source 1..21: mol_type = other RNA
gagaagaactaccccctgcac

SEQ ID NO: 5297 - RNA, 21 nt, synthetic construct
  source 1..21: mol_type = other RNA
cccggcacctacggcggcgag

SEQ ID NO: 5298 - RNA, 21 nt, synthetic construct
  source 1..21: mol_type = other RNA
cgggagagggctgatacgact

SEQ ID NO: 5299 - RNA, 21 nt, synthetic construct
  source 1..21: mol_type = other RNA
agcaacgtggacatcaagctg

SEQ ID NO: 5300 - RNA, 21 nt, synthetic construct
  source 1..21: mol_type = other RNA
acacggagcccacccgtcagc

SEQ ID NO: 5301 - RNA, 21 nt, synthetic construct
  source 1..21: mol_type = other RNA
ggcatgacgggcctaaacatg

SEQ ID NO: 5302 - RNA, 21 nt, synthetic construct
  source 1..21: mol_type = other RNA
agagagagagtggacaccatc

SEQ ID NO: 5303 - RNA, 21 nt, synthetic construct
  source 1..21: mol_type = other RNA
agaatcggcatggagctggcc

SEQ ID NO: 5304 - DNA, 21 bp, synthetic construct
  source 1..21: mol_type = other DNA
ggcatcatgagaacccagatg

SEQ ID NO: 5305 - RNA, 21 nt, synthetic construct
  source 1..21: mol_type = other RNA
agcggcgtgagagagggcaga

SEQ ID NO: 5306 - RNA, 21 nt, synthetic construct
  source 1..21: mol_type = other RNA
agcgtgagcctgaccagaatc

SEQ ID NO: 5307 - RNA, 21 nt, synthetic construct
  source 1..21: mol_type = other RNA
accaaattcagcggcaccatc

SEQ ID NO: 5308 - RNA, 21 nt, synthetic construct
  source 1..21: mol_type = other RNA
gatcgtgatggtaataagctg

SEQ ID NO: 5309 - RNA, 21 nt, synthetic construct
  source 1..21: mol_type = other RNA
gccaccagactgagcgacggc

SEQ ID NO: 5310 - RNA, 21 nt, synthetic construct
  source 1..21: mol_type = other RNA
aacgtcgtcagctctagtatg

SEQ ID NO: 5311 - DNA, 21 bp, synthetic construct
  source 1..21: mol_type = other DNA
aagaaggatacgatgattttg

SEQ ID NO: 5312 - RNA, 21 nt, synthetic construct
  source 1..21: mol_type = other RNA
gtgggtgcttcggctgcgaat

SEQ ID NO: 5313 - RNA, 21 nt, synthetic construct
  source 1..21: mol_type = other RNA
cgtcttgggggtactcgtgag

SEQ ID NO: 5314 - RNA, 21 nt, synthetic construct
  source 1..21: mol_type = other RNA
gagattgtgaatgcggttcgg

SEQ ID NO: 5315 - DNA, 21 bp, synthetic construct
  source 1..21: mol_type = other DNA
aagaaggagacgaagattttg

SEQ ID NO: 5316 - RNA, 21 nt, synthetic construct
  source 1..21: mol_type = other RNA
caaatcagagggatgggcatg

SEQ ID NO: 5317 - DNA, 21 bp, synthetic construct
  source 1..21: mol_type = other DNA
aaagtcacaggtggagactac

SEQ ID NO: 5318 - RNA, 21 nt, synthetic construct
  source 1..21: mol_type = other RNA
aacatccacaaggtgatcatg

SEQ ID NO: 5319 - RNA, 21 nt, synthetic construct
  source 1..21: mol_type = other RNA
ggctacggactcagcggtaac

SEQ ID NO: 5320 - DNA, 21 bp, synthetic construct
  source 1..21: mol_type = other DNA
ggcagagacagcgccgacaac

SEQ ID NO: 5321 - RNA, 21 nt, synthetic construct
  source 1..21: mol_type = other RNA
gtgaccggcatgagcgtgaag

SEQ ID NO: 5322 - RNA, 21 nt, synthetic construct
  source 1..21: mol_type = other RNA
gggtttttgtctggtcctgtt

SEQ ID NO: 5323 - RNA, 21 nt, synthetic construct
  source 1..21: mol_type = other RNA
aaggagacccagcacctgatc

SEQ ID NO: 5324 - RNA, 21 nt, synthetic construct
  source 1..21: mol_type = other RNA
aacagaaacgccagcgacaac

SEQ ID NO: 5325 - RNA, 21 nt, synthetic construct
  source 1..21: mol_type = other RNA
gtgatcagccagaagcccatc

SEQ ID NO: 5326 - RNA, 21 nt, synthetic construct
  source 1..21: mol_type = other RNA
catgggtcttatgggggtgag

SEQ ID NO: 5327 - RNA, 21 nt, synthetic construct
  source 1..21: mol_type = other RNA
gcaaaatacaacgaaaccttg

SEQ ID NO: 5328 - DNA, 21 bp, synthetic construct
  source 1..21: mol_type = other DNA
aagaaggagacgatgatttag

SEQ ID NO: 5329 - RNA, 21 nt, synthetic construct
  source 1..21: mol_type = other RNA
ggaacccttccaaacaccgca

SEQ ID NO: 5330 - RNA, 21 nt, synthetic construct
  source 1..21: mol_type = other RNA
acagaacccgccgtcagtgtc

SEQ ID NO: 5331 - DNA, 21 bp, synthetic construct
  source 1..21: mol_type = other DNA
ggaaggatgaacaacgccacc

SEQ ID NO: 5332 - RNA, 21 nt, synthetic construct
  source 1..21: mol_type = other RNA
gtggtatccaacggttggcca

SEQ ID NO: 5333 - RNA, 21 nt, synthetic construct
  source 1..21: mol_type = other RNA
caactctcgacaacctctatg

SEQ ID NO: 5334 - RNA, 21 nt, synthetic construct
  source 1..21: mol_type = other RNA
gtgctgagccccaagatcgtg

SEQ ID NO: 5335 - DNA, 21 bp, synthetic construct
  source 1..21: mol_type = other DNA
accgaggtgcaagcacaggcg

SEQ ID NO: 5336 - RNA, 21 nt, synthetic construct
  source 1..21: mol_type = other RNA
gccctcacaggtatcaaactg

SEQ ID NO: 5337 - RNA, 21 nt, synthetic construct
  source 1..21: mol_type = other RNA
gacaaagtcggcgtcgccgtg

SEQ ID NO: 5338 - DNA, 21 bp, synthetic construct
  source 1..21: mol_type = other DNA
aacaaggagacgatgattttg

SEQ ID NO: 5339 - RNA, 21 nt, synthetic construct
  source 1..21: mol_type = other RNA
agggaacgtttcgacacaacc

SEQ ID NO: 5340 - RNA, 21 nt, synthetic construct
  source 1..21: mol_type = other RNA
tcactggttcaaaacgttatt

SEQ ID NO: 5341 - DNA, 21 bp, synthetic construct
  source 1..21: mol_type = other DNA
atacttgacaaatggacagca

SEQ ID NO: 5342 - DNA, 21 bp, synthetic construct
  source 1..21: mol_type = other DNA
gccgacggcctctcaaaaatg

SEQ ID NO: 5343 - RNA, 21 nt, synthetic construct
  source 1..21: mol_type = other RNA
ccgggtagttacggcggagac

SEQ ID NO: 5344 - DNA, 21 bp, synthetic construct
  source 1..21: mol_type = other DNA
caagtaggcagttccacctac

SEQ ID NO: 5345 - RNA, 21 nt, synthetic construct
  source 1..21: mol_type = other RNA
gagaagagtccgtctgtgatg

SEQ ID NO: 5346 - RNA, 21 nt, synthetic construct
  source 1..21: mol_type = other RNA
catgcgatgattcatggtgtg

SEQ ID NO: 5347 - RNA, 21 nt, synthetic construct
  source 1..21: mol_type = other RNA
agcggactttcagtaaaagtt

SEQ ID NO: 5348 - RNA, 21 nt, synthetic construct
  source 1..21: mol_type = other RNA
ggtcttgggggtaatcgtgag

SEQ ID NO: 5349 - RNA, 21 nt, synthetic construct
  source 1..21: mol_type = other RNA
ggcttcggcctgagcggcaac

SEQ ID NO: 5350 - RNA, 21 nt, synthetic construct
  source 1..21: mol_type = other RNA
aagtggactgttaatattgag

SEQ ID NO: 5351 - DNA, 21 bp, synthetic construct
  source 1..21: mol_type = other DNA
acccgcttctccggaacagag

SEQ ID NO: 5352 - RNA, 21 nt, synthetic construct
  source 1..21: mol_type = other RNA
gtgagagccaccggcacccac

SEQ ID NO: 5353 - DNA, 21 bp, synthetic construct
  source 1..21: mol_type = other DNA
cacgcccctcctgctatcgtg

SEQ ID NO: 5354 - RNA, 21 nt, synthetic construct
  source 1..21: mol_type = other RNA
aagcagatcaaggacgccacc

SEQ ID NO: 5355 - RNA, 21 nt, synthetic construct
  source 1..21: mol_type = other RNA
accatcgagagaaccagcacc

SEQ ID NO: 5356 - RNA, 21 nt, synthetic construct
  source 1..21: mol_type = other RNA
aagaaggagacgatgattatg

SEQ ID NO: 5357 - RNA, 21 nt, synthetic construct
  source 1..21: mol_type = other RNA
gagaagagccccgccgtgatg

SEQ ID NO: 5358 - RNA, 21 nt, synthetic construct
  source 1..21: mol_type = other RNA
ggccgccacaacgaaacaaca

SEQ ID NO: 5359 - RNA, 21 nt, synthetic construct
  source 1..21: mol_type = other RNA
atgaacggcgtgagcccccac

SEQ ID NO: 5360 - RNA, 21 nt, synthetic construct
  source 1..21: mol_type = other RNA
gaaatcaaaccaatccaaagg

SEQ ID NO: 5361 - RNA, 21 nt, synthetic construct
  source 1..21: mol_type = other RNA
gtgttcggcaacaccatcggc

SEQ ID NO: 5362 - RNA, 21 nt, synthetic construct
  source 1..21: mol_type = other RNA
gccgtgaacaagaccctgctg

SEQ ID NO: 5363 - RNA, 21 nt, synthetic construct
  source 1..21: mol_type = other RNA
aggacctctaactctgacgtg

SEQ ID NO: 5364 - DNA, 21 bp, synthetic construct
  source 1..21: mol_type = other DNA
cacgcccctcctgctatgctg

SEQ ID NO: 5365 - RNA, 21 nt, synthetic construct
  source 1..21: mol_type = other RNA
gttgttgcggttgcgtcgagt

SEQ ID NO: 5366 - RNA, 21 nt, synthetic construct
  source 1..21: mol_type = other RNA
gttagactcagcgagcacata

SEQ ID NO: 5367 - RNA, 21 nt, synthetic construct
  source 1..21: mol_type = other RNA
tctgtgagcctaaccaaaaac

SEQ ID NO: 5368 - RNA, 21 nt, synthetic construct
  source 1..21: mol_type = other RNA
cagcagggggatacttcgtct

SEQ ID NO: 5369 - RNA, 21 nt, synthetic construct
  source 1..21: mol_type = other RNA
caagttgacagcggccccgca

SEQ ID NO: 5370 - RNA, 21 nt, synthetic construct
  source 1..21: mol_type = other RNA
gaaaaagggccacacaacgcc

SEQ ID NO: 5371 - RNA, 21 nt, synthetic construct
  source 1..21: mol_type = other RNA
cctcgagtcggggacactcct

SEQ ID NO: 5372 - RNA, 21 nt, synthetic construct
  source 1..21: mol_type = other RNA
ctggtgctgcagagcagcacc

SEQ ID NO: 5373 - RNA, 21 nt, synthetic construct
  source 1..21: mol_type = other RNA
ggtaagcagggggagaatcag

SEQ ID NO: 5374 - RNA, 21 nt, synthetic construct
  source 1..21: mol_type = other RNA
aaccaaaaagaaagcagggga

SEQ ID NO: 5375 - RNA, 21 nt, synthetic construct
  source 1..21: mol_type = other RNA
agagacagagtgatcctgatc

SEQ ID NO: 5376 - RNA, 21 nt, synthetic construct
  source 1..21: mol_type = other RNA
ggcagctacgaccagggcatg

SEQ ID NO: 5377 - RNA, 21 nt, synthetic construct
  source 1..21: mol_type = other RNA
agaaaggacctgctgatgggc

SEQ ID NO: 5378 - RNA, 21 nt, synthetic construct
  source 1..21: mol_type = other RNA
gtgctgagccccaacatcatg

SEQ ID NO: 5379 - RNA, 21 nt, synthetic construct
  source 1..21: mol_type = other RNA
gccacacggctgtcagacgta

SEQ ID NO: 5380 - RNA, 21 nt, synthetic construct
  source 1..21: mol_type = other RNA
caagtgctcaaaaacggcgct

SEQ ID NO: 5381 - RNA, 21 nt, synthetic construct
  source 1..21: mol_type = other RNA
gggaaggcgattgttgagaat

SEQ ID NO: 5382 - RNA, 21 nt, synthetic construct
  source 1..21: mol_type = other RNA
gtgaccatcggcgacggcttc

SEQ ID NO: 5383 - RNA, 21 nt, synthetic construct
  source 1..21: mol_type = other RNA
gaccccatcaccaagaacatc

SEQ ID NO: 5384 - RNA, 21 nt, synthetic construct
  source 1..21: mol_type = other RNA
gtgtttgaggcgcatagtgtt

SEQ ID NO: 5385 - RNA, 21 nt, synthetic construct
  source 1..21: mol_type = other RNA
catgttgggtcgtctactgtt

SEQ ID NO: 5386 - RNA, 21 nt, synthetic construct
  source 1..21: mol_type = other RNA
gttatagcctcatacgcagac

SEQ ID NO: 5387 - RNA, 21 nt, synthetic construct
  source 1..21: mol_type = other RNA
cagtttcgtggtatggagatg

SEQ ID NO: 5388 - DNA, 21 bp, synthetic construct
  source 1..21: mol_type = other DNA
agcgagagcagccaggaggac

SEQ ID NO: 5389 - RNA, 21 nt, synthetic construct
  source 1..21: mol_type = other RNA
aaggctgagttgaatcgggtt

SEQ ID NO: 5390 - RNA, 21 nt, synthetic construct
  source 1..21: mol_type = other RNA
ggcctgggcggcacccgcgac

SEQ ID NO: 5391 - RNA, 21 nt, synthetic construct
  source 1..21: mol_type = other RNA
tacctgaagatcaacaacatg

SEQ ID NO: 5392 - RNA, 21 nt, synthetic construct
  source 1..21: mol_type = other RNA
aaagccatggacggcatcata

SEQ ID NO: 5393 - RNA, 21 nt, synthetic construct
  source 1..21: mol_type = other RNA
gggtccgcctcggcccacaac

SEQ ID NO: 5394 - RNA, 21 nt, synthetic construct
  source 1..21: mol_type = other RNA
atggaaaacggcgctgacaaa

SEQ ID NO: 5395 - RNA, 21 nt, synthetic construct
  source 1..21: mol_type = other RNA
gcgagtcaggagtcgtctcgt

SEQ ID NO: 5396 - RNA, 21 nt, synthetic construct
  source 1..21: mol_type = other RNA
ggcatcaaggagaagaactac

SEQ ID NO: 5397 - DNA, 21 bp, synthetic construct
  source 1..21: mol_type = other DNA
tcgtggggaaacatcaaaacc

SEQ ID NO: 5398 - DNA, 21 bp, synthetic construct
  source 1..21: mol_type = other DNA
ggcagagccagcgacgacaac

SEQ ID NO: 5399 - RNA, 21 nt, synthetic construct
  source 1..21: mol_type = other RNA
aatgttagtctgagtgggatt

SEQ ID NO: 5400 - DNA, 21 bp, synthetic construct
  source 1..21: mol_type = other DNA
agtagggggaatattcagact

SEQ ID NO: 5401 - RNA, 21 nt, synthetic construct
  source 1..21: mol_type = other RNA
cacggccctccagcaatagtg

SEQ ID NO: 5402 - RNA, 21 nt, synthetic construct
  source 1..21: mol_type = other RNA
cgtactagtaatagtaatatt

SEQ ID NO: 5403 - RNA, 21 nt, synthetic construct
  source 1..21: mol_type = other RNA
gccagaaacgagagcgagggc

SEQ ID NO: 5404 - RNA, 21 nt, synthetic construct
  source 1..21: mol_type = other RNA
aaccacaacgggggcctccaa

SEQ ID NO: 5405 - DNA, 21 bp, synthetic construct
  source 1..21: mol_type = other DNA
agcgatagcagacaggaggac

SEQ ID NO: 5406 - RNA, 21 nt, synthetic construct
  source 1..21: mol_type = other RNA
aaaatagacaccatcaaactg

SEQ ID NO: 5407 - RNA, 21 nt, synthetic construct
  source 1..21: mol_type = other RNA
caggctactggtgggtcgtcg

SEQ ID NO: 5408 - RNA, 21 nt, synthetic construct
  source 1..21: mol_type = other RNA
gacaaaatatacggtgccctc

SEQ ID NO: 5409 - RNA, 21 nt, synthetic construct
  source 1..21: mol_type = other RNA
agcgtgaccgcagggcgttta

SEQ ID NO: 5410 - RNA, 21 nt, synthetic construct
  source 1..21: mol_type = other RNA
gccgcctacaaagcactttct

SEQ ID NO: 5411 - DNA, 21 bp, synthetic construct
  source 1..21: mol_type = other DNA
gagattaatcctattgatcgt

SEQ ID NO: 5412 - DNA, 21 bp, synthetic construct
  source 1..21: mol_type = other DNA
acctcacacaacaactctgtc

SEQ ID NO: 5413 - RNA, 21 nt, synthetic construct
  source 1..21: mol_type = other RNA
aagagaaacaccaccgacaac

SEQ ID NO: 5414 - RNA, 21 nt, synthetic construct
  source 1..21: mol_type = other RNA
gaacacgacgccagcatcaac

SEQ ID NO: 5415 - RNA, 21 nt, synthetic construct
  source 1..21: mol_type = other RNA
accggcgagagaaaccaggtg

SEQ ID NO: 5416 - RNA, 21 nt, synthetic construct
  source 1..21: mol_type = other RNA
tcacaaatcaacactagggaa

SEQ ID NO: 5417 - RNA, 21 nt, synthetic construct
  source 1..21: mol_type = other RNA
gtcatcaaagacagagaactg

SEQ ID NO: 5418 - RNA, 21 nt, synthetic construct
  source 1..21: mol_type = other RNA
actctgatgcataattcgagt

SEQ ID NO: 5419 - RNA, 21 nt, synthetic construct
  source 1..21: mol_type = other RNA
ccagaaaacaacaaaatcgac

SEQ ID NO: 5420 - RNA, 21 nt, synthetic construct
  source 1..21: mol_type = other RNA
ctgcacctgaccgagaacaga

SEQ ID NO: 5421 - RNA, 21 nt, synthetic construct
  source 1..21: mol_type = other RNA
tccggtagtcaaaacacacga

SEQ ID NO: 5422 - RNA, 21 nt, synthetic construct
  source 1..21: mol_type = other RNA
gagcagaaggggcttttgatt

SEQ ID NO: 5423 - RNA, 21 nt, synthetic construct
  source 1..21: mol_type = other RNA
aagaaggatgtgatgaatctt

SEQ ID NO: 5424 - RNA, 21 nt, synthetic construct
  source 1..21: mol_type = other RNA
accatcacccccagcagcagc

SEQ ID NO: 5425 - RNA, 21 nt, synthetic construct
  source 1..21: mol_type = other RNA
caggttgggtcgtctactgct

SEQ ID NO: 5426 - RNA, 21 nt, synthetic construct
  source 1..21: mol_type = other RNA
gtgcgcgcatctgggacccac

SEQ ID NO: 5427 - RNA, 21 nt, synthetic construct
  source 1..21: mol_type = other RNA
aacgccgtgggcaccaagacc

SEQ ID NO: 5428 - DNA, 21 bp, synthetic construct
  source 1..21: mol_type = other DNA
agcgagagcagacacgaggac

SEQ ID NO: 5429 - RNA, 21 nt, synthetic construct
  source 1..21: mol_type = other RNA
gtagcctacaaagccccctct

SEQ ID NO: 5430 - RNA, 21 nt, synthetic construct
  source 1..21: mol_type = other RNA
aaggatactggttctgaggtg

SEQ ID NO: 5431 - RNA, 21 nt, synthetic construct
  source 1..21: mol_type = other RNA
gagtctgaggtgaagcgggag

SEQ ID NO: 5432 - RNA, 21 nt, synthetic construct
  source 1..21: mol_type = other RNA
agaagcagcaccacccccacc

SEQ ID NO: 5433 - RNA, 21 nt, synthetic construct
  source 1..21: mol_type = other RNA
gttatcggtgcccactccgtc

SEQ ID NO: 5434 - RNA, 21 nt, synthetic construct
  source 1..21: mol_type = other RNA
ccttatgatagtcctacgagt

SEQ ID NO: 5435 - RNA, 21 nt, synthetic construct
  source 1..21: mol_type = other RNA
tctgagagtcggccggcggat

SEQ ID NO: 5436 - RNA, 21 nt, synthetic construct
  source 1..21: mol_type = other RNA
cctgtgagtagtgctaatctg

SEQ ID NO: 5437 - DNA, 21 bp, synthetic construct
  source 1..21: mol_type = other DNA
gtgaaagactacggcgctctg

SEQ ID NO: 5438 - RNA, 21 nt, synthetic construct
  source 1..21: mol_type = other RNA
agcagaagcgagagcccccag

SEQ ID NO: 5439 - RNA, 21 nt, synthetic construct
  source 1..21: mol_type = other RNA
ttgagggagcgtgatgtgtat

SEQ ID NO: 5440 - RNA, 21 nt, synthetic construct
  source 1..21: mol_type = other RNA
gcgaaatacaacggctcactt

SEQ ID NO: 5441 - DNA, 21 bp, synthetic construct
  source 1..21: mol_type = other DNA
ccctacaaccacccaagctcc

SEQ ID NO: 5442 - RNA, 21 nt, synthetic construct
  source 1..21: mol_type = other RNA
ggaactaactcagaattagtc

SEQ ID NO: 5443 - RNA, 21 nt, synthetic construct
  source 1..21: mol_type = other RNA
aaggagaacggcgtggacaag

SEQ ID NO: 5444 - RNA, 21 nt, synthetic construct
  source 1..21: mol_type = other RNA
ctggtccacggaaacgtcgcc

SEQ ID NO: 5445 - DNA, 21 bp, synthetic construct
  source 1..21: mol_type = other DNA
aacggattagccgtacactca

SEQ ID NO: 5446 - RNA, 21 nt, synthetic construct
  source 1..21: mol_type = other RNA
aacatcctgataaacaccgta

SEQ ID NO: 5447 - RNA, 21 nt, synthetic construct
  source 1..21: mol_type = other RNA
aaggtggtgaccagcgccatg

SEQ ID NO: 5448 - RNA, 21 nt, synthetic construct
  source 1..21: mol_type = other RNA
gtgattggtatggctgttaag

SEQ ID NO: 5449 - RNA, 21 nt, synthetic construct
  source 1..21: mol_type = other RNA
agtaggtcggagagtacgcag

SEQ ID NO: 5450 - RNA, 21 nt, synthetic construct
  source 1..21: mol_type = other RNA
gccgacgagagaggccagctg

SEQ ID NO: 5451 - RNA, 21 nt, synthetic construct
  source 1..21: mol_type = other RNA
atgtctcagaagacgtctttg

SEQ ID NO: 5452 - DNA, 21 bp, synthetic construct
  source 1..21: mol_type = other DNA
agcgagagcagacaggacgac

SEQ ID NO: 5453 - RNA, 21 nt, synthetic construct
  source 1..21: mol_type = other RNA
gacagcgagaagagagacctg

SEQ ID NO: 5454 - DNA, 21 bp, synthetic construct
  source 1..21: mol_type = other DNA
agcgagagaagacaggaggac

SEQ ID NO: 5455 - RNA, 21 nt, synthetic construct
  source 1..21: mol_type = other RNA
gccagccccaacaacagcgag

SEQ ID NO: 5456 - RNA, 21 nt, synthetic construct
  source 1..21: mol_type = other RNA
cgccaatccgtgaacagcggc

SEQ ID NO: 5457 - RNA, 21 nt, synthetic construct
  source 1..21: mol_type = other RNA
ggcagcagagccgaggacatg

SEQ ID NO: 5458 - RNA, 21 nt, synthetic construct
  source 1..21: mol_type = other RNA
cggatgactagggatgatacg

SEQ ID NO: 5459 - RNA, 21 nt, synthetic construct
  source 1..21: mol_type = other RNA
ggcctgaccggctacacccac

SEQ ID NO: 5460 - RNA, 21 nt, synthetic construct
  source 1..21: mol_type = other RNA
gcccacgagagaggccagctg

SEQ ID NO: 5461 - RNA, 21 nt, synthetic construct
  source 1..21: mol_type = other RNA
ctggtgatccacaccgagatc

SEQ ID NO: 5462 - RNA, 21 nt, synthetic construct
  source 1..21: mol_type = other RNA
gccaaggcccccgtgaccggc

SEQ ID NO: 5463 - RNA, 21 nt, synthetic construct
  source 1..21: mol_type = other RNA
ggcgaaagtgcctccgtgcaa

SEQ ID NO: 5464 - RNA, 21 nt, synthetic construct
  source 1..21: mol_type = other RNA
attagtgagaagatttcgagg

SEQ ID NO: 5465 - RNA, 21 nt, synthetic construct
  source 1..21: mol_type = other RNA
aaagaccccagaagcgcagtc

SEQ ID NO: 5466 - RNA, 21 nt, synthetic construct
  source 1..21: mol_type = other RNA
gactccaaagtgcggatggac

SEQ ID NO: 5467 - RNA, 21 nt, synthetic construct
  source 1..21: mol_type = other RNA
gtccaaaaaggccacctcatc

SEQ ID NO: 5468 - RNA, 21 nt, synthetic construct
  source 1..21: mol_type = other RNA
gttgttccggggctttatacg

SEQ ID NO: 5469 - RNA, 21 nt, synthetic construct
  source 1..21: mol_type = other RNA
gctaaggcgacggagactggg

SEQ ID NO: 5470 - RNA, 21 nt, synthetic construct
  source 1..21: mol_type = other RNA
cttgtggatcagaaatctgtg

SEQ ID NO: 5471 - RNA, 21 nt, synthetic construct
  source 1..21: mol_type = other RNA
gcagttacggcccgggtccaa

SEQ ID NO: 5472 - RNA, 21 nt, synthetic construct
  source 1..21: mol_type = other RNA
agcggcgccatcggcggcctg

SEQ ID NO: 5473 - RNA, 21 nt, synthetic construct
  source 1..21: mol_type = other RNA
gaaatcgtcaacggcgggcga

SEQ ID NO: 5474 - DNA, 21 bp, synthetic construct
  source 1..21: mol_type = other DNA
gtaaacatcggcaacggcttc

SEQ ID NO: 5475 - RNA, 21 nt, synthetic construct
  source 1..21: mol_type = other RNA
gcgatgaatgtgattgagggt

SEQ ID NO: 5476 - RNA, 21 nt, synthetic construct
  source 1..21: mol_type = other RNA
cgactggtccaaaacgaagac

SEQ ID NO: 5477 - RNA, 21 nt, synthetic construct
  source 1..21: mol_type = other RNA
gattatatgagtcggggtatt

SEQ ID NO: 5478 - RNA, 21 nt, synthetic construct
  source 1..21: mol_type = other RNA
ccctacaacaaccccagcagc

SEQ ID NO: 5479 - RNA, 21 nt, synthetic construct
  source 1..21: mol_type = other RNA
gccgccaccggcatcaagctg

SEQ ID NO: 5480 - RNA, 21 nt, synthetic construct
  source 1..21: mol_type = other RNA
ggggtgaacaaaaccctccac

SEQ ID NO: 5481 - RNA, 21 nt, synthetic construct
  source 1..21: mol_type = other RNA
ggcgagagaaagggccacgag

SEQ ID NO: 5482 - RNA, 21 nt, synthetic construct
  source 1..21: mol_type = other RNA
aaccaaaccggttctcgagga

SEQ ID NO: 5483 - RNA, 21 nt, synthetic construct
  source 1..21: mol_type = other RNA
ggagtataccaagacatgcga

SEQ ID NO: 5484 - RNA, 21 nt, synthetic construct
  source 1..21: mol_type = other RNA
cccaaacctgaaaccgtcatg

SEQ ID NO: 5485 - RNA, 21 nt, synthetic construct
  source 1..21: mol_type = other RNA
ccccgtgtcgacgtgaacctg

SEQ ID NO: 5486 - RNA, 21 nt, synthetic construct
  source 1..21: mol_type = other RNA
cgaaaccaaaacaactcccaa

SEQ ID NO: 5487 - RNA, 21 nt, synthetic construct
  source 1..21: mol_type = other RNA
agcgtgagcctgaccaagacc

SEQ ID NO: 5488 - RNA, 21 nt, synthetic construct
  source 1..21: mol_type = other RNA
aacaactcggaaggcaacaga

SEQ ID NO: 5489 - DNA, 21 bp, synthetic construct
  source 1..21: mol_type = other DNA
gtgaacatcggcaacggcctg

SEQ ID NO: 5490 - DNA, 21 bp, synthetic construct
  source 1..21: mol_type = other DNA
ttacttgacaaatcgacagca

SEQ ID NO: 5491 - RNA, 21 nt, synthetic construct
  source 1..21: mol_type = other RNA
ggatacggcgacaaccaacac

SEQ ID NO: 5492 - RNA, 21 nt, synthetic construct
  source 1..21: mol_type = other RNA
gcgagtctggagccgtctcgt

SEQ ID NO: 5493 - RNA, 21 nt, synthetic construct
  source 1..21: mol_type = other RNA
gcctctcaagaaccctactcc

SEQ ID NO: 5494 - DNA, 21 bp, synthetic construct
  source 1..21: mol_type = other DNA
cagatcagaggcaaggagacc

SEQ ID NO: 5495 - RNA, 21 nt, synthetic construct
  source 1..21: mol_type = other RNA
gtttcgaatgttaggatggat

SEQ ID NO: 5496 - DNA, 21 bp, synthetic construct
  source 1..21: mol_type = other DNA
gtgaaagtctaaggcgctctg

SEQ ID NO: 5497 - RNA, 21 nt, synthetic construct
  source 1..21: mol_type = other RNA
gtgagctacaaggccctgagc

SEQ ID NO: 5498 - RNA, 21 nt, synthetic construct
  source 1..21: mol_type = other RNA
atgatcgggctatctagtgcc

SEQ ID NO: 5499 - RNA, 21 nt, synthetic construct
  source 1..21: mol_type = other RNA
agcagcaagcccggcagctac

SEQ ID NO: 5500 - RNA, 21 nt, synthetic construct
  source 1..21: mol_type = other RNA
aagatcggcctgatcagcgcc

SEQ ID NO: 5501 - RNA, 21 nt, synthetic construct
  source 1..21: mol_type = other RNA
cccaacaacctgcccagaagc

SEQ ID NO: 5502 - RNA, 21 nt, synthetic construct
  source 1..21: mol_type = other RNA
atggtgaagatcgagaccggc

SEQ ID NO: 5503 - RNA, 21 nt, synthetic construct
  source 1..21: mol_type = other RNA
cggaccaccaactccgacatc

SEQ ID NO: 5504 - RNA, 21 nt, synthetic construct
  source 1..21: mol_type = other RNA
agtagggggaatattcagtct

SEQ ID NO: 5505 - RNA, 21 nt, synthetic construct
  source 1..21: mol_type = other RNA
acctcatccccgccagtgaac

SEQ ID NO: 5506 - RNA, 21 nt, synthetic construct
  source 1..21: mol_type = other RNA
aaacacatcaaagacggaact

SEQ ID NO: 5507 - RNA, 21 nt, synthetic construct
  source 1..21: mol_type = other RNA
agaagcgcccccaacatggac

SEQ ID NO: 5508 - RNA, 21 nt, synthetic construct
  source 1..21: mol_type = other RNA
ggcaagatgaacgtgcacagc

SEQ ID NO: 5509 - RNA, 21 nt, synthetic construct
  source 1..21: mol_type = other RNA
gagcccggcgtgaagagagag

SEQ ID NO: 5510 - RNA, 21 nt, synthetic construct
  source 1..21: mol_type = other RNA
gacgtggagaaccccggccag

SEQ ID NO: 5511 - RNA, 21 nt, synthetic construct
  source 1..21: mol_type = other RNA
aacgacttcggccacgtggtg

SEQ ID NO: 5512 - RNA, 21 nt, synthetic construct
  source 1..21: mol_type = other RNA
cccaccagaggcaagaacgtg

SEQ ID NO: 5513 - RNA, 21 nt, synthetic construct
  source 1..21: mol_type = other RNA
ctggtggaccagatcagcgtg

SEQ ID NO: 5514 - RNA, 21 nt, synthetic construct
  source 1..21: mol_type = other RNA
ccctacaacctcacaacgtcc

SEQ ID NO: 5515 - RNA, 21 nt, synthetic construct
  source 1..21: mol_type = other RNA
ggtaatggtacgcgtagtccg

SEQ ID NO: 5516 - RNA, 21 nt, synthetic construct
  source 1..21: mol_type = other RNA
ggcctgatgaccaagatcagc

SEQ ID NO: 5517 - RNA, 21 nt, synthetic construct
  source 1..21: mol_type = other RNA
ggtaacatgcaaacacaaaac

SEQ ID NO: 5518 - DNA, 21 bp, synthetic construct
  source 1..21: mol_type = other DNA
tcgtggggaaacaaccaaacc

SEQ ID NO: 5519 - RNA, 21 nt, synthetic construct
  source 1..21: mol_type = other RNA
acctcacccaacgactcagaa

SEQ ID NO: 5520 - RNA, 21 nt, synthetic construct
  source 1..21: mol_type = other RNA
atcgacagattcgagagcagc

SEQ ID NO: 5521 - RNA, 21 nt, synthetic construct
  source 1..21: mol_type = other RNA
gtgagaatcagcgaccacatc

SEQ ID NO: 5522 - RNA, 21 nt, synthetic construct
  source 1..21: mol_type = other RNA
ggcagcaagctggccaccccc

SEQ ID NO: 5523 - RNA, 21 nt, synthetic construct
  source 1..21: mol_type = other RNA
gtgttcgagagctacgccgac

SEQ ID NO: 5524 - RNA, 21 nt, synthetic construct
  source 1..21: mol_type = other RNA
aatcgtgaggattttaatcat

SEQ ID NO: 5525 - RNA, 21 nt, synthetic construct
  source 1..21: mol_type = other RNA
agcggcgtgagcgacggcaga

SEQ ID NO: 5526 - RNA, 21 nt, synthetic construct
  source 1..21: mol_type = other RNA
tcccgcagcgaacgcacccaa

SEQ ID NO: 5527 - RNA, 21 nt, synthetic construct
  source 1..21: mol_type = other RNA
gatgtggtgaatcctgggaag

SEQ ID NO: 5528 - RNA, 21 nt, synthetic construct
  source 1..21: mol_type = other RNA
ggatctgttgaacacatgaaa

SEQ ID NO: 5529 - RNA, 21 nt, synthetic construct
  source 1..21: mol_type = other RNA
ggcctgccccagaagatgatg

SEQ ID NO: 5530 - RNA, 21 nt, synthetic construct
  source 1..21: mol_type = other RNA
cctgttggggttcatattaag

SEQ ID NO: 5531 - RNA, 21 nt, synthetic construct
  source 1..21: mol_type = other RNA
ggcctgatgagcaagatcacc

SEQ ID NO: 5532 - RNA, 21 nt, synthetic construct
  source 1..21: mol_type = other RNA
ggcgtggagaaccccggcaag

SEQ ID NO: 5533 - RNA, 21 nt, synthetic construct
  source 1..21: mol_type = other RNA
gttagtgcgacgggtacgcat

SEQ ID NO: 5534 - RNA, 21 nt, synthetic construct
  source 1..21: mol_type = other RNA
ctggtgaaggacgtgaaccag

SEQ ID NO: 5535 - DNA, 21 bp, synthetic construct
  source 1..21: mol_type = other DNA
agcagaagcgagagccaccag

SEQ ID NO: 5536 - RNA, 21 nt, synthetic construct
  source 1..21: mol_type = other RNA
agtattagtgataattctggg

SEQ ID NO: 5537 - RNA, 21 nt, synthetic construct
  source 1..21: mol_type = other RNA
aacatcatgataaacagcgtg

SEQ ID NO: 5538 - RNA, 21 nt, synthetic construct
  source 1..21: mol_type = other RNA
ggcctgcaattagacgtctcc

SEQ ID NO: 5539 - DNA, 21 bp, synthetic construct
  source 1..21: mol_type = other DNA
gagattaagcctaatgatcgt

SEQ ID NO: 5540 - RNA, 21 nt, synthetic construct
  source 1..21: mol_type = other RNA
agtggtgggaataatagtgtt

SEQ ID NO: 5541 - RNA, 21 nt, synthetic construct
  source 1..21: mol_type = other RNA
gcttttggtgctcttaagatg

SEQ ID NO: 5542 - RNA, 21 nt, synthetic construct
  source 1..21: mol_type = other RNA
ggcaacgaagacaaccaacag

SEQ ID NO: 5543 - DNA, 21 bp, synthetic construct
  source 1..21: mol_type = other DNA
gttaaggtttatggggcgatg

SEQ ID NO: 5544 - DNA, 21 bp, synthetic construct
  source 1..21: mol_type = other DNA
taacttgacaaatggacagca

SEQ ID NO: 5545 - RNA, 21 nt, synthetic construct
  source 1..21: mol_type = other RNA
ggaatggccatagtgcaaaac

SEQ ID NO: 5546 - RNA, 21 nt, synthetic construct
  source 1..21: mol_type = other RNA
atgattagtcgtgttactact

SEQ ID NO: 5547 - RNA, 21 nt, synthetic construct
  source 1..21: mol_type = other RNA
ggtaagcagggggagattccg

SEQ ID NO: 5548 - RNA, 21 nt, synthetic construct
  source 1..21: mol_type = other RNA
aaaagcgactcccaccaatac

SEQ ID NO: 5549 - DNA, 21 bp, synthetic construct
  source 1..21: mol_type = other DNA
ccttatgatagtcatacgagt

SEQ ID NO: 5550 - RNA, 21 nt, synthetic construct
  source 1..21: mol_type = other RNA
agcggcgccatgggcgccctg

SEQ ID NO: 5551 - RNA, 21 nt, synthetic construct
  source 1..21: mol_type = other RNA
atgatcgaggcccccgccgtg

SEQ ID NO: 5552 - DNA, 21 bp, synthetic construct
  source 1..21: mol_type = other DNA
gagccgcaagcacaggcgaag

SEQ ID NO: 5553 - RNA, 21 nt, synthetic construct
  source 1..21: mol_type = other RNA
agaaacgcccccaacatggac

SEQ ID NO: 5554 - RNA, 21 nt, synthetic construct
  source 1..21: mol_type = other RNA
cgtcacgacaactccaacatg

SEQ ID NO: 5555 - DNA, 21 bp, synthetic construct
  source 1..21: mol_type = other DNA
gtgaaagtcaacggcgctctg

SEQ ID NO: 5556 - DNA, 21 bp, synthetic construct
  source 1..21: mol_type = other DNA
accagaatcagcggcaccgtg

SEQ ID NO: 5557 - RNA, 21 nt, synthetic construct
  source 1..21: mol_type = other RNA
acctacaaccacccatctagc

SEQ ID NO: 5558 - DNA, 21 bp, synthetic construct
  source 1..21: mol_type = other DNA
ggcagcaacaaggccacccac

SEQ ID NO: 5559 - RNA, 21 nt, synthetic construct
  source 1..21: mol_type = other RNA
gagatctacaacaccgcccag

SEQ ID NO: 5560 - RNA, 21 nt, synthetic construct
  source 1..21: mol_type = other RNA
aagaaggagaagatgattttg

SEQ ID NO: 5561 - RNA, 21 nt, synthetic construct
  source 1..21: mol_type = other RNA
aaccgttccaccagtgacaac

SEQ ID NO: 5562 - DNA, 21 bp, synthetic construct
  source 1..21: mol_type = other DNA
aaagacacagggtccgtcgta

SEQ ID NO: 5563 - RNA, 21 nt, synthetic construct
  source 1..21: mol_type = other RNA
caaatcggcagcagtacagtg

SEQ ID NO: 5564 - RNA, 21 nt, synthetic construct
  source 1..21: mol_type = other RNA
cggcttgttcatactatggaa

SEQ ID NO: 5565 - RNA, 21 nt, synthetic construct
  source 1..21: mol_type = other RNA
caggtgatgggcaccctgaac

SEQ ID NO: 5566 - RNA, 21 nt, synthetic construct
  source 1..21: mol_type = other RNA
ggccaagcacgagtgcccctt

SEQ ID NO: 5567 - RNA, 21 nt, synthetic construct
  source 1..21: mol_type = other RNA
ctcgtagaccaaaactcgctt

SEQ ID NO: 5568 - RNA, 21 nt, synthetic construct
  source 1..21: mol_type = other RNA
ccccctaggtcagaagtgatg

SEQ ID NO: 5569 - RNA, 21 nt, synthetic construct
  source 1..21: mol_type = other RNA
gccagcagcgtgggccagaag

SEQ ID NO: 5570 - RNA, 21 nt, synthetic construct
  source 1..21: mol_type = other RNA
aaactcggccacaactacgag

SEQ ID NO: 5571 - RNA, 21 nt, synthetic construct
  source 1..21: mol_type = other RNA
gcgaatattgagattgctgtg

SEQ ID NO: 5572 - RNA, 21 nt, synthetic construct
  source 1..21: mol_type = other RNA
aacaagaacgccgccaccggc

SEQ ID NO: 5573 - DNA, 21 bp, synthetic construct
  source 1..21: mol_type = other DNA
ggcaacaaactgcaaatagac

SEQ ID NO: 5574 - DNA, 21 bp, synthetic construct
  source 1..21: mol_type = other DNA
agttgggggaatattcagaat

SEQ ID NO: 5575 - RNA, 21 nt, synthetic construct
  source 1..21: mol_type = other RNA
ggcgtcgacaaccccgaccgc

SEQ ID NO: 5576 - DNA, 21 bp, synthetic construct
  source 1..21: mol_type = other DNA
atccttaacgggatagtcctg

SEQ ID NO: 5577 - DNA, 21 bp, synthetic construct
  source 1..21: mol_type = other DNA
agaagcagcagcacccccacc

SEQ ID NO: 5578 - RNA, 21 nt, synthetic construct
  source 1..21: mol_type = other RNA
cttaatgtgactgggcttacg

SEQ ID NO: 5579 - RNA, 21 nt, synthetic construct
  source 1..21: mol_type = other RNA
cccgcccgtggggaaaacgtc

SEQ ID NO: 5580 - RNA, 21 nt, synthetic construct
  source 1..21: mol_type = other RNA
ggcaagctgaccaacatggcc

SEQ ID NO: 5581 - RNA, 21 nt, synthetic construct
  source 1..21: mol_type = other RNA
ggcctgacccccttcggcaga

SEQ ID NO: 5582 - RNA, 21 nt, synthetic construct
  source 1..21: mol_type = other RNA
gattttctgagtcggggtatt

SEQ ID NO: 5583 - DNA, 21 bp, synthetic construct
  source 1..21: mol_type = other DNA
gagattaagcctattgaacgt

SEQ ID NO: 5584 - DNA, 21 bp, synthetic construct
  source 1..21: mol_type = other DNA
tggaaagaaacgcaagcagtg

SEQ ID NO: 5585 - RNA, 21 nt, synthetic construct
  source 1..21: mol_type = other RNA
gagacgttgcctaatatggct

SEQ ID NO: 5586 - RNA, 21 nt, synthetic construct
  source 1..21: mol_type = other RNA
cggagtgagaggacggagcag

SEQ ID NO: 5587 - RNA, 21 nt, synthetic construct
  source 1..21: mol_type = other RNA
gtggacaagagcatggtgacc

SEQ ID NO: 5588 - RNA, 21 nt, synthetic construct
  source 1..21: mol_type = other RNA
ggcggcgacaacgccgacaga

SEQ ID NO: 5589 - RNA, 21 nt, synthetic construct
  source 1..21: mol_type = other RNA
gcaacccggcaatccatgact

SEQ ID NO: 5590 - RNA, 21 nt, synthetic construct
  source 1..21: mol_type = other RNA
atcaaaatctacggcgctctc

SEQ ID NO: 5591 - RNA, 21 nt, synthetic construct
  source 1..21: mol_type = other RNA
ggctctgtcgaacacatgatg

SEQ ID NO: 5592 - DNA, 21 bp, synthetic construct
  source 1..21: mol_type = other DNA
gagcacgccagcgccgccaac

SEQ ID NO: 5593 - DNA, 21 bp, synthetic construct
  source 1..21: mol_type = other DNA
gatattaagcctattgatcgt

SEQ ID NO: 5594 - RNA, 21 nt, synthetic construct
  source 1..21: mol_type = other RNA
gccaaggcccccgagaccgcc

SEQ ID NO: 5595 - RNA, 21 nt, synthetic construct
  source 1..21: mol_type = other RNA
aacagaatcgacagcgccacc

SEQ ID NO: 5596 - RNA, 21 nt, synthetic construct
  source 1..21: mol_type = other RNA
aaccgcaacacatcccacaac

SEQ ID NO: 5597 - DNA, 21 bp, synthetic construct
  source 1..21: mol_type = other DNA
cagaatcgtggtatggagacg

SEQ ID NO: 5598 - DNA, 21 bp, synthetic construct
  source 1..21: mol_type = other DNA
ttacttgacaaatggacagaa

SEQ ID NO: 5599 - RNA, 21 nt, synthetic construct
  source 1..21: mol_type = other RNA
ggcctcctgtcaggcctggtg

SEQ ID NO: 5600 - RNA, 21 nt, synthetic construct
  source 1..21: mol_type = other RNA
agtggtgtgatgggtgggttg

SEQ ID NO: 5601 - RNA, 21 nt, synthetic construct
  source 1..21: mol_type = other RNA
agcatgaacggcatcctgatc

SEQ ID NO: 5602 - RNA, 21 nt, synthetic construct
  source 1..21: mol_type = other RNA
aacagagtgaccgcctaccag

SEQ ID NO: 5603 - DNA, 21 bp, synthetic construct
  source 1..21: mol_type = other DNA
gtgaacgaaaaagccaaatca

SEQ ID NO: 5604 - RNA, 21 nt, synthetic construct
  source 1..21: mol_type = other RNA
agagagagtaagcagatggct

SEQ ID NO: 5605 - RNA, 21 nt, synthetic construct
  source 1..21: mol_type = other RNA
cccaccagactgagcgagggc

SEQ ID NO: 5606 - RNA, 21 nt, synthetic construct
  source 1..21: mol_type = other RNA
gagttcggcaacaccaagggc

SEQ ID NO: 5607 - RNA, 21 nt, synthetic construct
  source 1..21: mol_type = other RNA
gctctcggggtcggccaaaaa

SEQ ID NO: 5608 - DNA, 21 bp, synthetic construct
  source 1..21: mol_type = other DNA
agaaaagagctgctggacggc

SEQ ID NO: 5609 - RNA, 21 nt, synthetic construct
  source 1..21: mol_type = other RNA
ggccacgccaacagcaacatg

SEQ ID NO: 5610 - DNA, 21 bp, synthetic construct
  source 1..21: mol_type = other DNA
gccaccagcggcatcaagctg

SEQ ID NO: 5611 - RNA, 21 nt, synthetic construct
  source 1..21: mol_type = other RNA
gaaatatacaacacagctctg

SEQ ID NO: 5612 - RNA, 21 nt, synthetic construct
  source 1..21: mol_type = other RNA
caaatatctggcatcgaaatg

SEQ ID NO: 5613 - RNA, 21 nt, synthetic construct
  source 1..21: mol_type = other RNA
caggggaggggtcttattggg

SEQ ID NO: 5614 - RNA, 21 nt, synthetic construct
  source 1..21: mol_type = other RNA
catggtcagccggcgatggtt

SEQ ID NO: 5615 - RNA, 21 nt, synthetic construct
  source 1..21: mol_type = other RNA
ggttttatgtctaagatttcg

SEQ ID NO: 5616 - DNA, 21 bp, synthetic construct
  source 1..21: mol_type = other DNA
tcgatggtcaaaaacgttgag

SEQ ID NO: 5617 - RNA, 21 nt, synthetic construct
  source 1..21: mol_type = other RNA
gcgaaagcaccccaaacaggt

SEQ ID NO: 5618 - RNA, 21 nt, synthetic construct
  source 1..21: mol_type = other RNA
ggttctttgaataatgctact

SEQ ID NO: 5619 - DNA, 21 bp, synthetic construct
  source 1..21: mol_type = other DNA
cacgccactcctgctatggtg

SEQ ID NO: 5620 - RNA, 21 nt, synthetic construct
  source 1..21: mol_type = other RNA
acctcccccaacaacacagaa

SEQ ID NO: 5621 - RNA, 21 nt, synthetic construct
  source 1..21: mol_type = other RNA
ctgcacggcctgagcaccgcc

SEQ ID NO: 5622 - RNA, 21 nt, synthetic construct
  source 1..21: mol_type = other RNA
ggccaggccgtgaagaccaac

SEQ ID NO: 5623 - RNA, 21 nt, synthetic construct
  source 1..21: mol_type = other RNA
cccactagaggcgaagacgtt

SEQ ID NO: 5624 - RNA, 21 nt, synthetic construct
  source 1..21: mol_type = other RNA
acaatccaccaagtcatagtc

SEQ ID NO: 5625 - RNA, 21 nt, synthetic construct
  source 1..21: mol_type = other RNA
cacgacaaatcttcagaaaac

SEQ ID NO: 5626 - RNA, 21 nt, synthetic construct
  source 1..21: mol_type = other RNA
gggtatgggtcgtctgggaat

SEQ ID NO: 5627 - RNA, 21 nt, synthetic construct
  source 1..21: mol_type = other RNA
aaagaccccgtgagtgccgtt

SEQ ID NO: 5628 - RNA, 21 nt, synthetic construct
  source 1..21: mol_type = other RNA
tcgatggtccaaaacgttgag

SEQ ID NO: 5629 - RNA, 21 nt, synthetic construct
  source 1..21: mol_type = other RNA
gctaaggcgccggagaatggg

SEQ ID NO: 5630 - RNA, 21 nt, synthetic construct
  source 1..21: mol_type = other RNA
accgaccccaagatccagaag

SEQ ID NO: 5631 - RNA, 21 nt, synthetic construct
  source 1..21: mol_type = other RNA
aacatcaccccatcatcctcg

SEQ ID NO: 5632 - RNA, 21 nt, synthetic construct
  source 1..21: mol_type = other RNA
atgcacgacctgagtaccgca

SEQ ID NO: 5633 - RNA, 21 nt, synthetic construct
  source 1..21: mol_type = other RNA
atggacacccaacacccaatc

SEQ ID NO: 5634 - RNA, 21 nt, synthetic construct
  source 1..21: mol_type = other RNA
gacgtgaagagcgacaccgag

SEQ ID NO: 5635 - RNA, 21 nt, synthetic construct
  source 1..21: mol_type = other RNA
gaaaaagttgaaaaagtttca

SEQ ID NO: 5636 - RNA, 21 nt, synthetic construct
  source 1..21: mol_type = other RNA
aaagacgaaatgaaccgcgtc

SEQ ID NO: 5637 - DNA, 21 bp, synthetic construct
  source 1..21: mol_type = other DNA
atgaacagcgccaaggagccc

SEQ ID NO: 5638 - RNA, 21 nt, synthetic construct
  source 1..21: mol_type = other RNA
ccgccatactcagaaaactcc

SEQ ID NO: 5639 - RNA, 21 nt, synthetic construct
  source 1..21: mol_type = other RNA
gtggggagtgagagagcgatt

SEQ ID NO: 5640 - RNA, 21 nt, synthetic construct
  source 1..21: mol_type = other RNA
tcgaggaatgggattactaat

SEQ ID NO: 5641 - DNA, 21 bp, synthetic construct
  source 1..21: mol_type = other DNA
cacgcccctcctgctatggag

SEQ ID NO: 5642 - RNA, 21 nt, synthetic construct
  source 1..21: mol_type = other RNA
agtagtgagaagatttcgagg

SEQ ID NO: 5643 - RNA, 21 nt, synthetic construct
  source 1..21: mol_type = other RNA
acgaatcaacaggttattatg

SEQ ID NO: 5644 - RNA, 21 nt, synthetic construct
  source 1..21: mol_type = other RNA
gccacccggcagtcggaaggc

SEQ ID NO: 5645 - RNA, 21 nt, synthetic construct
  source 1..21: mol_type = other RNA
ggcatggccatcgtcgaagac

SEQ ID NO: 5646 - RNA, 21 nt, synthetic construct
  source 1..21: mol_type = other RNA
gtgaaaatctacggcgccttc

SEQ ID NO: 5647 - RNA, 21 nt, synthetic construct
  source 1..21: mol_type = other RNA
aacgtggtgagcagcgccatg

SEQ ID NO: 5648 - RNA, 21 nt, synthetic construct
  source 1..21: mol_type = other RNA
cagattcgtgctatggagatg

SEQ ID NO: 5649 - RNA, 21 nt, synthetic construct
  source 1..21: mol_type = other RNA
ggatacgaagactaccaacac

SEQ ID NO: 5650 - DNA, 21 bp, synthetic construct
  source 1..21: mol_type = other DNA
caaaacaccgggcgaagctct

SEQ ID NO: 5651 - RNA, 21 nt, synthetic construct
  source 1..21: mol_type = other RNA
attgataggtctgagaggtcg

SEQ ID NO: 5652 - RNA, 21 nt, synthetic construct
  source 1..21: mol_type = other RNA
tctgagagtcggcaggcgcat

SEQ ID NO: 5653 - DNA, 21 bp, synthetic construct
  source 1..21: mol_type = other DNA
tttattaataatttgaagatg

SEQ ID NO: 5654 - RNA, 21 nt, synthetic construct
  source 1..21: mol_type = other RNA
aaggatcctggttctgcggtg

SEQ ID NO: 5655 - RNA, 21 nt, synthetic construct
  source 1..21: mol_type = other RNA
gcagacggcgtctcaaaaatg

SEQ ID NO: 5656 - RNA, 21 nt, synthetic construct
  source 1..21: mol_type = other RNA
agcggagctatgggcggtagc

SEQ ID NO: 5657 - RNA, 21 nt, synthetic construct
  source 1..21: mol_type = other RNA
gttatcgcgacaaaaagcatc

SEQ ID NO: 5658 - RNA, 21 nt, synthetic construct
  source 1..21: mol_type = other RNA
gagatgactgggttgcgggag

SEQ ID NO: 5659 - RNA, 21 nt, synthetic construct
  source 1..21: mol_type = other RNA
caaacatcctcagaggcaaga

SEQ ID NO: 5660 - RNA, 21 nt, synthetic construct
  source 1..21: mol_type = other RNA
ggctacggcctgagcggcatc

SEQ ID NO: 5661 - RNA, 21 nt, synthetic construct
  source 1..21: mol_type = other RNA
agcttaaacgggatggttctg

SEQ ID NO: 5662 - RNA, 21 nt, synthetic construct
  source 1..21: mol_type = other RNA
aagatccaccaggacaacatg

SEQ ID NO: 5663 - DNA, 21 bp, synthetic construct
  source 1..21: mol_type = other DNA
gacaagaacgagaccaagatg

SEQ ID NO: 5664 - RNA, 21 nt, synthetic construct
  source 1..21: mol_type = other RNA
gtgaaacaagggggggagcag

SEQ ID NO: 5665 - RNA, 21 nt, synthetic construct
  source 1..21: mol_type = other RNA
gagagagacggctacaagctg

SEQ ID NO: 5666 - RNA, 21 nt, synthetic construct
  source 1..21: mol_type = other RNA
gatgagggggctacgcctaag

SEQ ID NO: 5667 - RNA, 21 nt, synthetic construct
  source 1..21: mol_type = other RNA
aaagacacacaaaacctcata

SEQ ID NO: 5668 - RNA, 21 nt, synthetic construct
  source 1..21: mol_type = other RNA
gacaaggacggcgtggccgcc

SEQ ID NO: 5669 - RNA, 21 nt, synthetic construct
  source 1..21: mol_type = other RNA
gtcttccgtgcccactccgtc

SEQ ID NO: 5670 - DNA, 21 bp, synthetic construct
  source 1..21: mol_type = other DNA
agcgagagcagacaggaggaa

SEQ ID NO: 5671 - RNA, 21 nt, synthetic construct
  source 1..21: mol_type = other RNA
gacctgagtaggcacactctg

SEQ ID NO: 5672 - RNA, 21 nt, synthetic construct
  source 1..21: mol_type = other RNA
ggagtaacagaccgggtgcaa

SEQ ID NO: 5673 - RNA, 21 nt, synthetic construct
  source 1..21: mol_type = other RNA
gctcatgagaggggtctgttg

SEQ ID NO: 5674 - RNA, 21 nt, synthetic construct
  source 1..21: mol_type = other RNA
ggtgtgtatcagaatatgagt

SEQ ID NO: 5675 - RNA, 21 nt, synthetic construct
  source 1..21: mol_type = other RNA
tggcagctgaccgagaacaga

SEQ ID NO: 5676 - RNA, 21 nt, synthetic construct
  source 1..21: mol_type = other RNA
aacagaggcgccgcctaccag

SEQ ID NO: 5677 - RNA, 21 nt, synthetic construct
  source 1..21: mol_type = other RNA
gtgaacaaggacagagtgctg

SEQ ID NO: 5678 - DNA, 21 bp, synthetic construct
  source 1..21: mol_type = other DNA
cacggcacctacggcggcgag

SEQ ID NO: 5679 - RNA, 21 nt, synthetic construct
  source 1..21: mol_type = other RNA
agtactattgaggtgtctgtt

SEQ ID NO: 5680 - DNA, 21 bp, synthetic construct
  source 1..21: mol_type = other DNA
gttaagagttatggggagttg

SEQ ID NO: 5681 - RNA, 21 nt, synthetic construct
  source 1..21: mol_type = other RNA
ggccaggcccccgtgcccatg

SEQ ID NO: 5682 - RNA, 21 nt, synthetic construct
  source 1..21: mol_type = other RNA
accgggaaaggctccgaactg

SEQ ID NO: 5683 - RNA, 21 nt, synthetic construct
  source 1..21: mol_type = other RNA
ggccacgaggacaaccagcac

SEQ ID NO: 5684 - DNA, 21 bp, synthetic construct
  source 1..21: mol_type = other DNA
cacggctcatacggcgtctca

SEQ ID NO: 5685 - RNA, 21 nt, synthetic construct
  source 1..21: mol_type = other RNA
cccgtgagaagcgccaacctg

SEQ ID NO: 5686 - RNA, 21 nt, synthetic construct
  source 1..21: mol_type = other RNA
ctcgtcaacaacaccgaaatc

SEQ ID NO: 5687 - RNA, 21 nt, synthetic construct
  source 1..21: mol_type = other RNA
aacctggtgagcagcgccatg

SEQ ID NO: 5688 - RNA, 21 nt, synthetic construct
  source 1..21: mol_type = other RNA
ggcgacgctggccaaaaagac

SEQ ID NO: 5689 - RNA, 21 nt, synthetic construct
  source 1..21: mol_type = other RNA
ggtttgtatgatcagggtaag

SEQ ID NO: 5690 - RNA, 21 nt, synthetic construct
  source 1..21: mol_type = other RNA
gagaacgccagctacgccgcc

SEQ ID NO: 5691 - DNA, 21 bp, synthetic construct
  source 1..21: mol_type = other DNA
ctggtgaaccagaccgagata

SEQ ID NO: 5692 - DNA, 21 bp, synthetic construct
  source 1..21: mol_type = other DNA
agagagagcagacaggaggac

SEQ ID NO: 5693 - RNA, 21 nt, synthetic construct
  source 1..21: mol_type = other RNA
tctggtgtgtcggggaaggtg

SEQ ID NO: 5694 - RNA, 21 nt, synthetic construct
  source 1..21: mol_type = other RNA
agtctgggaaccgagttccac

SEQ ID NO: 5695 - DNA, 21 bp, synthetic construct
  source 1..21: mol_type = other DNA
aagaaagaaaccatgaaactt

SEQ ID NO: 5696 - RNA, 21 nt, synthetic construct
  source 1..21: mol_type = other RNA
gtgctgagccccaacaacgtg

SEQ ID NO: 5697 - DNA, 21 bp, synthetic construct
  source 1..21: mol_type = other DNA
ttaattgacaaatggacagca

SEQ ID NO: 5698 - RNA, 21 nt, synthetic construct
  source 1..21: mol_type = other RNA
ggtaatgagcaggcggagcgt

SEQ ID NO: 5699 - RNA, 21 nt, synthetic construct
  source 1..21: mol_type = other RNA
gggattcaggagaaggcgcat

SEQ ID NO: 5700 - RNA, 21 nt, synthetic construct
  source 1..21: mol_type = other RNA
gcttggtctgtaggccaaaaa

SEQ ID NO: 5701 - RNA, 21 nt, synthetic construct
  source 1..21: mol_type = other RNA
aacggccagggcgtgtacgtg

SEQ ID NO: 5702 - RNA, 21 nt, synthetic construct
  source 1..21: mol_type = other RNA
gacgtcgaaaacccaggaaac

SEQ ID NO: 5703 - RNA, 21 nt, synthetic construct
  source 1..21: mol_type = other RNA
actattaatccgtcgagtagt

SEQ ID NO: 5704 - DNA, 21 bp, synthetic construct
  source 1..21: mol_type = other DNA
cggagagacaggacggagcag

SEQ ID NO: 5705 - DNA, 21 bp, synthetic construct
  source 1..21: mol_type = other DNA
tccagccttcgaaaccacagc

SEQ ID NO: 5706 - RNA, 21 nt, synthetic construct
  source 1..21: mol_type = other RNA
ctcatccctagcgttgacgtt

SEQ ID NO: 5707 - RNA, 21 nt, synthetic construct
  source 1..21: mol_type = other RNA
aagtggactgataatcttgag

SEQ ID NO: 5708 - RNA, 21 nt, synthetic construct
  source 1..21: mol_type = other RNA
ggtcttcgaggcgaagacatg

SEQ ID NO: 5709 - DNA, 21 bp, synthetic construct
  source 1..21: mol_type = other DNA
cagatcgccagctacgccgcc

SEQ ID NO: 5710 - RNA, 21 nt, synthetic construct
  source 1..21: mol_type = other RNA
aatacttcggtggggaagagt

SEQ ID NO: 5711 - RNA, 21 nt, synthetic construct
  source 1..21: mol_type = other RNA
aatcatagtggtgggcctcag

SEQ ID NO: 5712 - RNA, 21 nt, synthetic construct
  source 1..21: mol_type = other RNA
accaccgaaaggacagccacc

SEQ ID NO: 5713 - RNA, 21 nt, synthetic construct
  source 1..21: mol_type = other RNA
ggcatgcagggcgtgagaaac

SEQ ID NO: 5714 - RNA, 21 nt, synthetic construct
  source 1..21: mol_type = other RNA
ggcaacggcaccagcaacccc

SEQ ID NO: 5715 - RNA, 21 nt, synthetic construct
  source 1..21: mol_type = other RNA
agcgagagcagaaaggccgac

SEQ ID NO: 5716 - DNA, 21 bp, synthetic construct
  source 1..21: mol_type = other DNA
cggagagagagcacggagcag

SEQ ID NO: 5717 - RNA, 21 nt, synthetic construct
  source 1..21: mol_type = other RNA
ggtgagcgtaaggttcatgcg

SEQ ID NO: 5718 - RNA, 21 nt, synthetic construct
  source 1..21: mol_type = other RNA
aatattcagcggaatacgctg

SEQ ID NO: 5719 - RNA, 21 nt, synthetic construct
  source 1..21: mol_type = other RNA
gacgtcgaatacccgggcaaa

SEQ ID NO: 5720 - RNA, 21 nt, synthetic construct
  source 1..21: mol_type = other RNA
gtgcaggccagagtgcccatg

SEQ ID NO: 5721 - RNA, 21 nt, synthetic construct
  source 1..21: mol_type = other RNA
gtcaaggaacaagctgaaaga

SEQ ID NO: 5722 - RNA, 21 nt, synthetic construct
  source 1..21: mol_type = other RNA
cttaattttagtactcttgtt

SEQ ID NO: 5723 - RNA, 21 nt, synthetic construct
  source 1..21: mol_type = other RNA
aacgccatcaacaggatggtg

SEQ ID NO: 5724 - RNA, 21 nt, synthetic construct
  source 1..21: mol_type = other RNA
tggaaagaaacccaaggcatc

SEQ ID NO: 5725 - DNA, 21 bp, synthetic construct
  source 1..21: mol_type = other DNA
gactacctgagcagaggcgag

SEQ ID NO: 5726 - RNA, 21 nt, synthetic construct
  source 1..21: mol_type = other RNA
gacaaagaaatgagagcactt

SEQ ID NO: 5727 - RNA, 21 nt, synthetic construct
  source 1..21: mol_type = other RNA
cgtgtggctctggatgtgcag

SEQ ID NO: 5728 - RNA, 21 nt, synthetic construct
  source 1..21: mol_type = other RNA
cccacctggggcgagaacgtg

SEQ ID NO: 5729 - DNA, 21 bp, synthetic construct
  source 1..21: mol_type = other DNA
cagattcgtggtatggagccg

SEQ ID NO: 5730 - DNA, 21 bp, synthetic construct
  source 1..21: mol_type = other DNA
tccagccttggaaaccacaga

SEQ ID NO: 5731 - DNA, 21 bp, synthetic construct
  source 1..21: mol_type = other DNA
agcgacagcaagcagctggac

SEQ ID NO: 5732 - RNA, 21 nt, synthetic construct
  source 1..21: mol_type = other RNA
gtgagccccaactaccaggtg

SEQ ID NO: 5733 - RNA, 21 nt, synthetic construct
  source 1..21: mol_type = other RNA
agaatcggcatggcccaggcc

SEQ ID NO: 5734 - DNA, 21 bp, synthetic construct
  source 1..21: mol_type = other DNA
gagaataagcctattgatcgt

SEQ ID NO: 5735 - DNA, 21 bp, synthetic construct
  source 1..21: mol_type = other DNA
ctgctgaacggcatcaccaac

SEQ ID NO: 5736 - RNA, 21 nt, synthetic construct
  source 1..21: mol_type = other RNA
atgctgctgagaaccgacgag

SEQ ID NO: 5737 - DNA, 21 bp, synthetic construct
  source 1..21: mol_type = other DNA
gtgatcagcgctaaaaaagaa

SEQ ID NO: 5738 - RNA, 21 nt, synthetic construct
  source 1..21: mol_type = other RNA
cgtgtggctatggaggtgcag

SEQ ID NO: 5739 - RNA, 21 nt, synthetic construct
  source 1..21: mol_type = other RNA
agtgacagccgtcaagctgac

SEQ ID NO: 5740 - RNA, 21 nt, synthetic construct
  source 1..21: mol_type = other RNA
tctggggaaagtgtgcgtgcg

SEQ ID NO: 5741 - RNA, 21 nt, synthetic construct
  source 1..21: mol_type = other RNA
cctaagccggaggctgtgttg

SEQ ID NO: 5742 - DNA, 21 bp, synthetic construct
  source 1..21: mol_type = other DNA
cggagagagaggacggatcag

SEQ ID NO: 5743 - RNA, 21 nt, synthetic construct
  source 1..21: mol_type = other RNA
ggaatctcctccaacacacaa

SEQ ID NO: 5744 - DNA, 21 bp, synthetic construct
  source 1..21: mol_type = other DNA
agaagcagcaccacccccccc

SEQ ID NO: 5745 - DNA, 21 bp, synthetic construct
  source 1..21: mol_type = other DNA
gtgacccaggcccaggccaag

SEQ ID NO: 5746 - RNA, 21 nt, synthetic construct
  source 1..21: mol_type = other RNA
cgccacgccaacagtgacatg

SEQ ID NO: 5747 - RNA, 21 nt, synthetic construct
  source 1..21: mol_type = other RNA
agaaccagcaacagagacatc

SEQ ID NO: 5748 - DNA, 21 bp, synthetic construct
  source 1..21: mol_type = other DNA
caacaaggcataagcagtaga

SEQ ID NO: 5749 - RNA, 21 nt, synthetic construct
  source 1..21: mol_type = other RNA
ctgactaaggttgatagtgcg

SEQ ID NO: 5750 - RNA, 21 nt, synthetic construct
  source 1..21: mol_type = other RNA
cccaccagaagcgagaacgtg

SEQ ID NO: 5751 - RNA, 21 nt, synthetic construct
  source 1..21: mol_type = other RNA
gtcggttcggaatccgctaca

SEQ ID NO: 5752 - RNA, 21 nt, synthetic construct
  source 1..21: mol_type = other RNA
cacctggtggccgtgggcgtg

SEQ ID NO: 5753 - DNA, 21 bp, synthetic construct
  source 1..21: mol_type = other DNA
caaaacacccggggaagctct

SEQ ID NO: 5754 - RNA, 21 nt, synthetic construct
  source 1..21: mol_type = other RNA
accatccacaagatcatcatg

SEQ ID NO: 5755 - RNA, 21 nt, synthetic construct
  source 1..21: mol_type = other RNA
aacagcgtgagccaccagtac

SEQ ID NO: 5756 - DNA, 21 bp, synthetic construct
  source 1..21: mol_type = other DNA
tttattaataatttgcagaag

SEQ ID NO: 5757 - RNA, 21 nt, synthetic construct
  source 1..21: mol_type = other RNA
cagaagagcagcgacgccaga

SEQ ID NO: 5758 - RNA, 21 nt, synthetic construct
  source 1..21: mol_type = other RNA
gcgacgcgtcttagtgcgggg

SEQ ID NO: 5759 - RNA, 21 nt, synthetic construct
  source 1..21: mol_type = other RNA
atcgacggtatcgacccttct

SEQ ID NO: 5760 - RNA, 21 nt, synthetic construct
  source 1..21: mol_type = other RNA
agcatgaacggcatcagcaac

SEQ ID NO: 5761 - RNA, 21 nt, synthetic construct
  source 1..21: mol_type = other RNA
ctgggcaagcacacccagatc

SEQ ID NO: 5762 - RNA, 21 nt, synthetic construct
  source 1..21: mol_type = other RNA
aacgacttcagacacgtggtg

SEQ ID NO: 5763 - RNA, 21 nt, synthetic construct
  source 1..21: mol_type = other RNA
aagagagaggactacaaccac

SEQ ID NO: 5764 - RNA, 21 nt, synthetic construct
  source 1..21: mol_type = other RNA
gaccaacttaaaatgagagtt

SEQ ID NO: 5765 - RNA, 21 nt, synthetic construct
  source 1..21: mol_type = other RNA
gtggataagagtatgatgagg

SEQ ID NO: 5766 - RNA, 21 nt, synthetic construct
  source 1..21: mol_type = other RNA
caacgctccactagcggggta

SEQ ID NO: 5767 - DNA, 21 bp, synthetic construct
  source 1..21: mol_type = other DNA
gtcaccgtcggcaacggctta

SEQ ID NO: 5768 - DNA, 21 bp, synthetic construct
  source 1..21: mol_type = other DNA
agccgaagtgaatctctcaaa

SEQ ID NO: 5769 - RNA, 21 nt, synthetic construct
  source 1..21: mol_type = other RNA
ctgttggttgggacaggaatc

SEQ ID NO: 5770 - DNA, 21 bp, synthetic construct
  source 1..21: mol_type = other DNA
gactacatgagcagaggcgtg

SEQ ID NO: 5771 - RNA, 21 nt, synthetic construct
  source 1..21: mol_type = other RNA
gaggccaaggtgtacagcctg

SEQ ID NO: 5772 - RNA, 21 nt, synthetic construct
  source 1..21: mol_type = other RNA
aatgttctgtctagtgctatg

SEQ ID NO: 5773 - RNA, 21 nt, synthetic construct
  source 1..21: mol_type = other RNA
cttagcttaaaaacctcacta

SEQ ID NO: 5774 - RNA, 21 nt, synthetic construct
  source 1..21: mol_type = other RNA
cccggcagcagcaaggtgagc

SEQ ID NO: 5775 - DNA, 21 bp, synthetic construct
  source 1..21: mol_type = other DNA
ggttacgaagataaccaacac

SEQ ID NO: 5776 - RNA, 21 nt, synthetic construct
  source 1..21: mol_type = other RNA
agcaaggtggacatcaccctg

SEQ ID NO: 5777 - DNA, 21 bp, synthetic construct
  source 1..21: mol_type = other DNA
atggtgacccagcaactgatc

SEQ ID NO: 5778 - RNA, 21 nt, synthetic construct
  source 1..21: mol_type = other RNA
ccccccagaagcgagatcatg

SEQ ID NO: 5779 - RNA, 21 nt, synthetic construct
  source 1..21: mol_type = other RNA
gtgctccacggaaacgtcgca

SEQ ID NO: 5780 - DNA, 21 bp, synthetic construct
  source 1..21: mol_type = other DNA
aacgagaaagagcagagaaga

SEQ ID NO: 5781 - RNA, 21 nt, synthetic construct
  source 1..21: mol_type = other RNA
acgtcgcggaataatagtgag

SEQ ID NO: 5782 - DNA, 21 bp, synthetic construct
  source 1..21: mol_type = other DNA
gagaccatcggcaacggcctg

SEQ ID NO: 5783 - DNA, 21 bp, synthetic construct
  source 1..21: mol_type = other DNA
aaggtcgttacatcggacatg

SEQ ID NO: 5784 - DNA, 21 bp, synthetic construct
  source 1..21: mol_type = other DNA
acccgctactccggaacagtg

SEQ ID NO: 5785 - RNA, 21 nt, synthetic construct
  source 1..21: mol_type = other RNA
aaccacaacggcggcagacag

SEQ ID NO: 5786 - RNA, 21 nt, synthetic construct
  source 1..21: mol_type = other RNA
atgcgtaatcagactgcgatt

SEQ ID NO: 5787 - RNA, 21 nt, synthetic construct
  source 1..21: mol_type = other RNA
gaaacaggaaaagccgtgaaa

SEQ ID NO: 5788 - RNA, 21 nt, synthetic construct
  source 1..21: mol_type = other RNA
gttaacaacggaggagaaaaa

SEQ ID NO: 5789 - RNA, 21 nt, synthetic construct
  source 1..21: mol_type = other RNA
ggccgcgcatacgcacacaac

SEQ ID NO: 5790 - RNA, 21 nt, synthetic construct
  source 1..21: mol_type = other RNA
tacgaatcaagacaagctgac

SEQ ID NO: 5791 - RNA, 21 nt, synthetic construct
  source 1..21: mol_type = other RNA
cccaccagaggcgagaacatg

SEQ ID NO: 5792 - RNA, 21 nt, synthetic construct
  source 1..21: mol_type = other RNA
actggtgtgaggaatcaggtg

SEQ ID NO: 5793 - RNA, 21 nt, synthetic construct
  source 1..21: mol_type = other RNA
gcgagtcaggagccgtctcgt

SEQ ID NO: 5794 - RNA, 21 nt, synthetic construct
  source 1..21: mol_type = other RNA
ggcctgcacgaccaaggaatg

SEQ ID NO: 5795 - RNA, 21 nt, synthetic construct
  source 1..21: mol_type = other RNA
cctgagagtagtgctaatctg

SEQ ID NO: 5796 - RNA, 21 nt, synthetic construct
  source 1..21: mol_type = other RNA
aaattcggcggaggcgacttc

SEQ ID NO: 5797 - RNA, 21 nt, synthetic construct
  source 1..21: mol_type = other RNA
acccagggcgccgagagcctg

SEQ ID NO: 5798 - DNA, 21 bp, synthetic construct
  source 1..21: mol_type = other DNA
atgaacagcgacaaggtgccc

SEQ ID NO: 5799 - DNA, 21 bp, synthetic construct
  source 1..21: mol_type = other DNA
aaatcagacggagtcgcgggg

SEQ ID NO: 5800 - RNA, 21 nt, synthetic construct
  source 1..21: mol_type = other RNA
ccgtataatgttcctagttct

SEQ ID NO: 5801 - DNA, 21 bp, synthetic construct
  source 1..21: mol_type = other DNA
aacctggtgcccggcctaacc

SEQ ID NO: 5802 - RNA, 21 nt, synthetic construct
  source 1..21: mol_type = other RNA
aacatcgagagaaccgccacc

SEQ ID NO: 5803 - DNA, 21 bp, synthetic construct
  source 1..21: mol_type = other DNA
cagttcgccagctacgccgac

SEQ ID NO: 5804 - RNA, 21 nt, synthetic construct
  source 1..21: mol_type = other RNA
gccaagcagggcgagatccag

SEQ ID NO: 5805 - RNA, 21 nt, synthetic construct
  source 1..21: mol_type = other RNA
gtcgaacgagccgttacatca

SEQ ID NO: 5806 - RNA, 21 nt, synthetic construct
  source 1..21: mol_type = other RNA
agggtagcccaagaagtccaa

SEQ ID NO: 5807 - RNA, 21 nt, synthetic construct
  source 1..21: mol_type = other RNA
atttcggtgggtacgaagtcg

SEQ ID NO: 5808 - RNA, 21 nt, synthetic construct
  source 1..21: mol_type = other RNA
gacgtgccggttatcaggaac

SEQ ID NO: 5809 - RNA, 21 nt, synthetic construct
  source 1..21: mol_type = other RNA
gtgaagcacggcggcgagcag

SEQ ID NO: 5810 - DNA, 21 bp, synthetic construct
  source 1..21: mol_type = other DNA
ggcagcaacatggccaccaac

SEQ ID NO: 5811 - DNA, 21 bp, synthetic construct
  source 1..21: mol_type = other DNA
ggcagagccagctccgacaac

SEQ ID NO: 5812 - RNA, 21 nt, synthetic construct
  source 1..21: mol_type = other RNA
atgggcctgatcaacaggcaa

SEQ ID NO: 5813 - DNA, 21 bp, synthetic construct
  source 1..21: mol_type = other DNA
gtgcagcaagcacaggcgaag

SEQ ID NO: 5814 - RNA, 21 nt, synthetic construct
  source 1..21: mol_type = other RNA
cagagaggcgtgagcagcagc

SEQ ID NO: 5815 - RNA, 21 nt, synthetic construct
  source 1..21: mol_type = other RNA
gaccatgatgcttctagtaat

SEQ ID NO: 5816 - RNA, 21 nt, synthetic construct
  source 1..21: mol_type = other RNA
gacatcagtgctaaacacgaa

SEQ ID NO: 5817 - RNA, 21 nt, synthetic construct
  source 1..21: mol_type = other RNA
ggcatgcaaggcgtctccaac

SEQ ID NO: 5818 - RNA, 21 nt, synthetic construct
  source 1..21: mol_type = other RNA
aacagagaggactacaaccac

SEQ ID NO: 5819 - DNA, 21 bp, synthetic construct
  source 1..21: mol_type = other DNA
cagttagccagctacgccgcc

SEQ ID NO: 5820 - RNA, 21 nt, synthetic construct
  source 1..21: mol_type = other RNA
gggggaagtggtcaaaaagac

SEQ ID NO: 5821 - RNA, 21 nt, synthetic construct
  source 1..21: mol_type = other RNA
gtgttccaaagagaacacgtt

SEQ ID NO: 5822 - RNA, 21 nt, synthetic construct
  source 1..21: mol_type = other RNA
agggccagagaagaacacatg

SEQ ID NO: 5823 - RNA, 21 nt, synthetic construct
  source 1..21: mol_type = other RNA
ggagaacggaaattccacgaa

SEQ ID NO: 5824 - DNA, 21 bp, synthetic construct
  source 1..21: mol_type = other DNA
ggcagcaacatggccacccaa

SEQ ID NO: 5825 - DNA, 21 bp, synthetic construct
  source 1..21: mol_type = other DNA
cagtacgccagctacgccgcc

SEQ ID NO: 5826 - DNA, 21 bp, synthetic construct
  source 1..21: mol_type = other DNA
cagttcgccagctacgacgcc

SEQ ID NO: 5827 - RNA, 21 nt, synthetic construct
  source 1..21: mol_type = other RNA
gctgtgggcctctcaaaaatg

SEQ ID NO: 5828 - RNA, 21 nt, synthetic construct
  source 1..21: mol_type = other RNA
tctcagggggctaagtcgctt

SEQ ID NO: 5829 - RNA, 21 nt, synthetic construct
  source 1..21: mol_type = other RNA
tcgttgttgcctgggaatctt

SEQ ID NO: 5830 - RNA, 21 nt, synthetic construct
  source 1..21: mol_type = other RNA
ttccgcatcgactcaacaacc

SEQ ID NO: 5831 - DNA, 21 bp, synthetic construct
  source 1..21: mol_type = other DNA
ggcagactgaccgagacccaa

SEQ ID NO: 5832 - RNA, 21 nt, synthetic construct
  source 1..21: mol_type = other RNA
ctgcggggtggtgatacgccg

SEQ ID NO: 5833 - RNA, 21 nt, synthetic construct
  source 1..21: mol_type = other RNA
gtcaccgcgatggccgtcaaa

SEQ ID NO: 5834 - DNA, 21 bp, synthetic construct
  source 1..21: mol_type = other DNA
aacgagaacgagaagagaaga

SEQ ID NO: 5835 - RNA, 21 nt, synthetic construct
  source 1..21: mol_type = other RNA
tctgggcttcgtcctcagatg

SEQ ID NO: 5836 - RNA, 21 nt, synthetic construct
  source 1..21: mol_type = other RNA
aagaatgatacttttaaggtt

SEQ ID NO: 5837 - RNA, 21 nt, synthetic construct
  source 1..21: mol_type = other RNA
gacgctaacaaagctctctcg

SEQ ID NO: 5838 - RNA, 21 nt, synthetic construct
  source 1..21: mol_type = other RNA
cacgtgcagagaatgaccatg

SEQ ID NO: 5839 - RNA, 21 nt, synthetic construct
  source 1..21: mol_type = other RNA
gttgtcggagctcactcagtg

SEQ ID NO: 5840 - RNA, 21 nt, synthetic construct
  source 1..21: mol_type = other RNA
ggcagacacaacgagatcacc

SEQ ID NO: 5841 - RNA, 21 nt, synthetic construct
  source 1..21: mol_type = other RNA
gtgatgaagattgagacgggg

SEQ ID NO: 5842 - DNA, 21 bp, synthetic construct
  source 1..21: mol_type = other DNA
ggttatgggttgtctgggagt

SEQ ID NO: 5843 - RNA, 21 nt, synthetic construct
  source 1..21: mol_type = other RNA
gacaagaacgagagcaccggc

SEQ ID NO: 5844 - DNA, 21 bp, synthetic construct
  source 1..21: mol_type = other DNA
cacgagaacaccaagatcaac

SEQ ID NO: 5845 - DNA, 21 bp, synthetic construct
  source 1..21: mol_type = other DNA
gtgctgagacccaagatcgtg

SEQ ID NO: 5846 - RNA, 21 nt, synthetic construct
  source 1..21: mol_type = other RNA
aacgaaaacgaacaacaacct

SEQ ID NO: 5847 - DNA, 21 bp, synthetic construct
  source 1..21: mol_type = other DNA
ggctccttccacgtcgaaata

SEQ ID NO: 5848 - RNA, 21 nt, synthetic construct
  source 1..21: mol_type = other RNA
gggaggcataatgagacttcg

SEQ ID NO: 5849 - RNA, 21 nt, synthetic construct
  source 1..21: mol_type = other RNA
agactgtacgaccagggcatg

SEQ ID NO: 5850 - DNA, 21 bp, synthetic construct
  source 1..21: mol_type = other DNA
gggacgcgtcttagagagggg

SEQ ID NO: 5851 - RNA, 21 nt, synthetic construct
  source 1..21: mol_type = other RNA
ggtttgtcgcagaagatgaag

SEQ ID NO: 5852 - DNA, 21 bp, synthetic construct
  source 1..21: mol_type = other DNA
cacgcccctcctgctaaggtg

SEQ ID NO: 5853 - RNA, 21 nt, synthetic construct
  source 1..21: mol_type = other RNA
ctcgtcgaccgcaactcggtt

SEQ ID NO: 5854 - RNA, 21 nt, synthetic construct
  source 1..21: mol_type = other RNA
cggctcggacacaactacgac

SEQ ID NO: 5855 - RNA, 21 nt, synthetic construct
  source 1..21: mol_type = other RNA
ctgaccaaggtggacagcgtg

SEQ ID NO: 5856 - RNA, 21 nt, synthetic construct
  source 1..21: mol_type = other RNA
aaaatccaccaagacatcatg

SEQ ID NO: 5857 - RNA, 21 nt, synthetic construct
  source 1..21: mol_type = other RNA
ggcctaatgtcaaaaatcccc

SEQ ID NO: 5858 - RNA, 21 nt, synthetic construct
  source 1..21: mol_type = other RNA
aacaacagcgagggcagcaga

SEQ ID NO: 5859 - RNA, 21 nt, synthetic construct
  source 1..21: mol_type = other RNA
cagagagtgggcgacaccccc

SEQ ID NO: 5860 - DNA, 21 bp, synthetic construct
  source 1..21: mol_type = other DNA
accatccacaacctgatcatc

SEQ ID NO: 5861 - RNA, 21 nt, synthetic construct
  source 1..21: mol_type = other RNA
gtgggtgctacgaagagtatt

SEQ ID NO: 5862 - RNA, 21 nt, synthetic construct
  source 1..21: mol_type = other RNA
tcttactacgcaagcaaaact

SEQ ID NO: 5863 - RNA, 21 nt, synthetic construct
  source 1..21: mol_type = other RNA
aatattcagcggaatcagctg

SEQ ID NO: 5864 - RNA, 21 nt, synthetic construct
  source 1..21: mol_type = other RNA
atgattcaggctccggctatg

SEQ ID NO: 5865 - DNA, 21 bp, synthetic construct
  source 1..21: mol_type = other DNA
gtgctgagacccaacatcatg

SEQ ID NO: 5866 - RNA, 21 nt, synthetic construct
  source 1..21: mol_type = other RNA
tccatgataggcatcacgaac

SEQ ID NO: 5867 - DNA, 21 bp, synthetic construct
  source 1..21: mol_type = other DNA
agcggcgccatgggcggcgag

SEQ ID NO: 5868 - DNA, 21 bp, synthetic construct
  source 1..21: mol_type = other DNA
gtgcacgacagcgccgccaac

SEQ ID NO: 5869 - DNA, 21 bp, synthetic construct
  source 1..21: mol_type = other DNA
ggtcttgggagttctcgtgag

SEQ ID NO: 5870 - RNA, 21 nt, synthetic construct
  source 1..21: mol_type = other RNA
ggcctcaaactcaacgtctct

SEQ ID NO: 5871 - RNA, 21 nt, synthetic construct
  source 1..21: mol_type = other RNA
tcccccaccggaatcaaatta

SEQ ID NO: 5872 - RNA, 21 nt, synthetic construct
  source 1..21: mol_type = other RNA
atagacagattcgacagatct

SEQ ID NO: 5873 - DNA, 21 bp, synthetic construct
  source 1..21: mol_type = other DNA
accggcttcgcagtacactca

SEQ ID NO: 5874 - RNA, 21 nt, synthetic construct
  source 1..21: mol_type = other RNA
ggagaaaccgcccgcgaccaa

SEQ ID NO: 5875 - RNA, 21 nt, synthetic construct
  source 1..21: mol_type = other RNA
aagatcaaccaggtgatcatc

SEQ ID NO: 5876 - RNA, 21 nt, synthetic construct
  source 1..21: mol_type = other RNA
ggcggcgccggccagaacgac

SEQ ID NO: 5877 - RNA, 21 nt, synthetic construct
  source 1..21: mol_type = other RNA
ccgccgcgttctgggtttatg

SEQ ID NO: 5878 - RNA, 21 nt, synthetic construct
  source 1..21: mol_type = other RNA
aaaaaccaccaagtgatcatg

SEQ ID NO: 5879 - DNA, 21 bp, synthetic construct
  source 1..21: mol_type = other DNA
gttaagagttaaggggcgttg

SEQ ID NO: 5880 - RNA, 21 nt, synthetic construct
  source 1..21: mol_type = other RNA
ccaaaacaagaaaccgttctg

SEQ ID NO: 5881 - DNA, 21 bp, synthetic construct
  source 1..21: mol_type = other DNA
ggcagaaacatggccacccac

SEQ ID NO: 5882 - RNA, 21 nt, synthetic construct
  source 1..21: mol_type = other RNA
aatcataatggtgggactcag

SEQ ID NO: 5883 - RNA, 21 nt, synthetic construct
  source 1..21: mol_type = other RNA
aacagaaacaccagcgacaag

SEQ ID NO: 5884 - RNA, 21 nt, synthetic construct
  source 1..21: mol_type = other RNA
gtaatctctgctaaactgcaa

SEQ ID NO: 5885 - RNA, 21 nt, synthetic construct
  source 1..21: mol_type = other RNA
ggcgtgaacagcgacctgcag

SEQ ID NO: 5886 - RNA, 21 nt, synthetic construct
  source 1..21: mol_type = other RNA
tacacctcaggcttcgtgaac

SEQ ID NO: 5887 - DNA, 21 bp, synthetic construct
  source 1..21: mol_type = other DNA
ggctccttccaagtcgaaatg

SEQ ID NO: 5888 - DNA, 21 bp, synthetic construct
  source 1..21: mol_type = other DNA
accagattaagcggcaccgtg

SEQ ID NO: 5889 - RNA, 21 nt, synthetic construct
  source 1..21: mol_type = other RNA
ggccaggccagagaccccatg

SEQ ID NO: 5890 - DNA, 21 bp, synthetic construct
  source 1..21: mol_type = other DNA
caacaaggcataagaagtagc

SEQ ID NO: 5891 - RNA, 21 nt, synthetic construct
  source 1..21: mol_type = other RNA
agaaacggcatggccctggcc

SEQ ID NO: 5892 - RNA, 21 nt, synthetic construct
  source 1..21: mol_type = other RNA
ggtagtaatttgccgactcct

SEQ ID NO: 5893 - RNA, 21 nt, synthetic construct
  source 1..21: mol_type = other RNA
actatgtcgagtgctgatggg

SEQ ID NO: 5894 - DNA, 21 bp, synthetic construct
  source 1..21: mol_type = other DNA
gagattaagactattgatcgt

SEQ ID NO: 5895 - RNA, 21 nt, synthetic construct
  source 1..21: mol_type = other RNA
aatgagaatcagcagcagcgg

SEQ ID NO: 5896 - DNA, 21 bp, synthetic construct
  source 1..21: mol_type = other DNA
gagattaagcatattgatcgt

SEQ ID NO: 5897 - DNA, 21 bp, synthetic construct
  source 1..21: mol_type = other DNA
ggcagagccagcgccgacacc

SEQ ID NO: 5898 - RNA, 21 nt, synthetic construct
  source 1..21: mol_type = other RNA
ggtgtgtctgctaaggttcag

SEQ ID NO: 5899 - DNA, 21 bp, synthetic construct
  source 1..21: mol_type = other DNA
aaagacccagggtccgtcgaa

SEQ ID NO: 5900 - RNA, 21 nt, synthetic construct
  source 1..21: mol_type = other RNA
gaccagatcagcaagaacatc

SEQ ID NO: 5901 - RNA, 21 nt, synthetic construct
  source 1..21: mol_type = other RNA
attaaagaaacaatgaaactg

SEQ ID NO: 5902 - DNA, 21 bp, synthetic construct
  source 1..21: mol_type = other DNA
gagaaggtggtgaaggagacc

SEQ ID NO: 5903 - RNA, 21 nt, synthetic construct
  source 1..21: mol_type = other RNA
gacaacaaagccaaacacgaa

SEQ ID NO: 5904 - RNA, 21 nt, synthetic construct
  source 1..21: mol_type = other RNA
agcaccagcaacagcgacatc

SEQ ID NO: 5905 - RNA, 21 nt, synthetic construct
  source 1..21: mol_type = other RNA
atgattaatcgtgttactgct

SEQ ID NO: 5906 - DNA, 21 bp, synthetic construct
  source 1..21: mol_type = other DNA
cacgcccctcctgatatggtg

SEQ ID NO: 5907 - RNA, 21 nt, synthetic construct
  source 1..21: mol_type = other RNA
ggtagtaatatggcgactcct

SEQ ID NO: 5908 - DNA, 21 bp, synthetic construct
  source 1..21: mol_type = other DNA
acgattaatcaggttattaat

SEQ ID NO: 5909 - RNA, 21 nt, synthetic construct
  source 1..21: mol_type = other RNA
cgtctgaatcatatggatact

SEQ ID NO: 5910 - RNA, 21 nt, synthetic construct
  source 1..21: mol_type = other RNA
gagagagacggcaacaagctg

SEQ ID NO: 5911 - RNA, 21 nt, synthetic construct
  source 1..21: mol_type = other RNA
gctaaccgattgtccatgacc

SEQ ID NO: 5912 - DNA, 21 bp, synthetic construct
  source 1..21: mol_type = other DNA
agcgacaccaagatccacaag

SEQ ID NO: 5913 - RNA, 21 nt, synthetic construct
  source 1..21: mol_type = other RNA
gacgtaggtaaccccggcaaa

SEQ ID NO: 5914 - DNA, 21 bp, synthetic construct
  source 1..21: mol_type = other DNA
agcagcaagcacgccacctac

SEQ ID NO: 5915 - RNA, 21 nt, synthetic construct
  source 1..21: mol_type = other RNA
agagtggccctggaggtgcag

SEQ ID NO: 5916 - DNA, 21 bp, synthetic construct
  source 1..21: mol_type = other DNA
gtgcgcgccagcgccgccaac

SEQ ID NO: 5917 - DNA, 21 bp, synthetic construct
  source 1..21: mol_type = other DNA
atcgtgacccagcacctgatc

SEQ ID NO: 5918 - DNA, 21 bp, synthetic construct
  source 1..21: mol_type = other DNA
tcgtggggaaaaatccaaacc

SEQ ID NO: 5919 - RNA, 21 nt, synthetic construct
  source 1..21: mol_type = other RNA
cccggcagctacggcggcggc

SEQ ID NO: 5920 - DNA, 21 bp, synthetic construct
  source 1..21: mol_type = other DNA
agccttgtcaaaaacgttgtg

SEQ ID NO: 5921 - RNA, 21 nt, synthetic construct
  source 1..21: mol_type = other RNA
agtgagaagactgaggtgctg

SEQ ID NO: 5922 - RNA, 21 nt, synthetic construct
  source 1..21: mol_type = other RNA
ccttttgatagtccttcgaga

SEQ ID NO: 5923 - RNA, 21 nt, synthetic construct
  source 1..21: mol_type = other RNA
cccgtgggcgaccacatcgag

SEQ ID NO: 5924 - RNA, 21 nt, synthetic construct
  source 1..21: mol_type = other RNA
cagggcccccccgccatggtg

SEQ ID NO: 5925 - RNA, 21 nt, synthetic construct
  source 1..21: mol_type = other RNA
ggcgtgcaccagaacatgaga

SEQ ID NO: 5926 - DNA, 21 bp, synthetic construct
  source 1..21: mol_type = other DNA
gagaaggtggagaaggtgacc

SEQ ID NO: 5927 - RNA, 21 nt, synthetic construct
  source 1..21: mol_type = other RNA
ggggttaattctgctctgcgg

SEQ ID NO: 5928 - DNA, 21 bp, synthetic construct
  source 1..21: mol_type = other DNA
accagcaccaacaacagcgtg

SEQ ID NO: 5929 - DNA, 21 bp, synthetic construct
  source 1..21: mol_type = other DNA
tatattaataatttgcagatg

SEQ ID NO: 5930 - DNA, 21 bp, synthetic construct
  source 1..21: mol_type = other DNA
gtgcacgccagcgacgccaac

SEQ ID NO: 5931 - DNA, 21 bp, synthetic construct
  source 1..21: mol_type = other DNA
agcgagagcagacaggagcac

SEQ ID NO: 5932 - RNA, 21 nt, synthetic construct
  source 1..21: mol_type = other RNA
ctgagagaccagaccgccatc

SEQ ID NO: 5933 - DNA, 21 bp, synthetic construct
  source 1..21: mol_type = other DNA
atgaacagcgccaaggtgacc

SEQ ID NO: 5934 - RNA, 21 nt, synthetic construct
  source 1..21: mol_type = other RNA
ggtttggtgcagaatgtggat

SEQ ID NO: 5935 - RNA, 21 nt, synthetic construct
  source 1..21: mol_type = other RNA
ggagtttaccaaaacgtcagg

SEQ ID NO: 5936 - RNA, 21 nt, synthetic construct
  source 1..21: mol_type = other RNA
ggcgtgagcgacagagtgcac

SEQ ID NO: 5937 - DNA, 21 bp, synthetic construct
  source 1..21: mol_type = other DNA
accggcttggcagtacaatca

SEQ ID NO: 5938 - RNA, 21 nt, synthetic construct
  source 1..21: mol_type = other RNA
cccatccaccaagtgatcaaa

SEQ ID NO: 5939 - RNA, 21 nt, synthetic construct
  source 1..21: mol_type = other RNA
gggactattgggaatgggttt

SEQ ID NO: 5940 - RNA, 21 nt, synthetic construct
  source 1..21: mol_type = other RNA
gtggataagagtatggtgaag

SEQ ID NO: 5941 - RNA, 21 nt, synthetic construct
  source 1..21: mol_type = other RNA
caacaaggcgtcccatcttca

SEQ ID NO: 5942 - DNA, 21 bp, synthetic construct
  source 1..21: mol_type = other DNA
caagacaccgggggaagctct

SEQ ID NO: 5943 - DNA, 21 bp, synthetic construct
  source 1..21: mol_type = other DNA
aacagattcagcggcaccgtg

SEQ ID NO: 5944 - DNA, 21 bp, synthetic construct
  source 1..21: mol_type = other DNA
gtgcacgccagcgccgccaaa

SEQ ID NO: 5945 - RNA, 21 nt, synthetic construct
  source 1..21: mol_type = other RNA
gggccggcggttaagacgtat

SEQ ID NO: 5946 - DNA, 21 bp, synthetic construct
  source 1..21: mol_type = other DNA
gtgcaagccagcgccgccaac

SEQ ID NO: 5947 - RNA, 21 nt, synthetic construct
  source 1..21: mol_type = other RNA
aggaatgctccgaatatgggt

SEQ ID NO: 5948 - DNA, 21 bp, synthetic construct
  source 1..21: mol_type = other DNA
gtcaccgtcggcaacggcatc

SEQ ID NO: 5949 - RNA, 21 nt, synthetic construct
  source 1..21: mol_type = other RNA
gaggtgaacatcaagatgagc

SEQ ID NO: 5950 - DNA, 21 bp, synthetic construct
  source 1..21: mol_type = other DNA
gtgaccatcggcgacggcctg

SEQ ID NO: 5951 - DNA, 21 bp, synthetic construct
  source 1..21: mol_type = other DNA
ggcagagccagagacgacaac

SEQ ID NO: 5952 - RNA, 21 nt, synthetic construct
  source 1..21: mol_type = other RNA
gtgaaccacggcggcgagcag

SEQ ID NO: 5953 - RNA, 21 nt, synthetic construct
  source 1..21: mol_type = other RNA
gtgggcagagagagcgccatc

SEQ ID NO: 5954 - DNA, 21 bp, synthetic construct
  source 1..21: mol_type = other DNA
accggcttggcagtacactaa

SEQ ID NO: 5955 - RNA, 21 nt, synthetic construct
  source 1..21: mol_type = other RNA
ggagaacggaaagtgaacgaa

SEQ ID NO: 5956 - DNA, 21 bp, synthetic construct
  source 1..21: mol_type = other DNA
ggcagcaacatggccaaccac

SEQ ID NO: 5957 - DNA, 21 bp, synthetic construct
  source 1..21: mol_type = other DNA
tttattaataaattgcagatg

SEQ ID NO: 5958 - RNA, 21 nt, synthetic construct
  source 1..21: mol_type = other RNA
gtgattaaggatagggtgttc

SEQ ID NO: 5959 - DNA, 21 bp, synthetic construct
  source 1..21: mol_type = other DNA
ctgaagaacggaatcacaaac

SEQ ID NO: 5960 - DNA, 21 bp, synthetic construct
  source 1..21: mol_type = other DNA
tttattaataatatgcagatg

SEQ ID NO: 5961 - RNA, 21 nt, synthetic construct
  source 1..21: mol_type = other RNA
ctcgtaaaaaacggcataata

SEQ ID NO: 5962 - RNA, 21 nt, synthetic construct
  source 1..21: mol_type = other RNA
ttaagcaaagtacggatggac

SEQ ID NO: 5963 - RNA, 21 nt, synthetic construct
  source 1..21: mol_type = other RNA
tctgagagtcggcaggcggat

SEQ ID NO: 5964 - DNA, 21 bp, synthetic construct
  source 1..21: mol_type = other DNA
ggtgctcgtgaggagcaaacg

SEQ ID NO: 5965 - RNA, 21 nt, synthetic construct
  source 1..21: mol_type = other RNA
cacatcgtcgcagtcggggtc

SEQ ID NO: 5966 - RNA, 21 nt, synthetic construct
  source 1..21: mol_type = other RNA
ctgagcaacagccccagaagc

SEQ ID NO: 5967 - RNA, 21 nt, synthetic construct
  source 1..21: mol_type = other RNA
gccaacatcgtttccgcagtc

SEQ ID NO: 5968 - RNA, 21 nt, synthetic construct
  source 1..21: mol_type = other RNA
tcgctggtacaaaacgtcgcg

SEQ ID NO: 5969 - DNA, 21 bp, synthetic construct
  source 1..21: mol_type = other DNA
gtgcccaaggcccaggccaag

SEQ ID NO: 5970 - RNA, 21 nt, synthetic construct
  source 1..21: mol_type = other RNA
gggaggaataatgatactacg

SEQ ID NO: 5971 - RNA, 21 nt, synthetic construct
  source 1..21: mol_type = other RNA
attgcggtggctacgaagtcg

SEQ ID NO: 5972 - RNA, 21 nt, synthetic construct
  source 1..21: mol_type = other RNA
ggctgcgtggagcacaccatg

SEQ ID NO: 5973 - DNA, 21 bp, synthetic construct
  source 1..21: mol_type = other DNA
cgcagagccagcgccgacaac

SEQ ID NO: 5974 - RNA, 21 nt, synthetic construct
  source 1..21: mol_type = other RNA
gcgggagaaagaaaccaagta

SEQ ID NO: 5975 - RNA, 21 nt, synthetic construct
  source 1..21: mol_type = other RNA
tctaaggcgccggagactggg

SEQ ID NO: 5976 - DNA, 21 bp, synthetic construct
  source 1..21: mol_type = other DNA
aagagagacgactacaaccac

SEQ ID NO: 5977 - DNA, 21 bp, synthetic construct
  source 1..21: mol_type = other DNA
ggcagatccagcgccgacaac

SEQ ID NO: 5978 - RNA, 21 nt, synthetic construct
  source 1..21: mol_type = other RNA
accacccccaagaacagcgag

SEQ ID NO: 5979 - RNA, 21 nt, synthetic construct
  source 1..21: mol_type = other RNA
agcactaggggagaaaacgtt

SEQ ID NO: 5980 - DNA, 21 bp, synthetic construct
  source 1..21: mol_type = other DNA
tctatggtcaaaaaagtcgac

SEQ ID NO: 5981 - DNA, 21 bp, synthetic construct
  source 1..21: mol_type = other DNA
aagaagcagacgatgattttg

SEQ ID NO: 5982 - RNA, 21 nt, synthetic construct
  source 1..21: mol_type = other RNA
caggtgggcagcagcaccatc

SEQ ID NO: 5983 - DNA, 21 bp, synthetic construct
  source 1..21: mol_type = other DNA
gaccacgacgccagcagaaac

SEQ ID NO: 5984 - DNA, 21 bp, synthetic construct
  source 1..21: mol_type = other DNA
ccctccagaggcgagaacgag

SEQ ID NO: 5985 - RNA, 21 nt, synthetic construct
  source 1..21: mol_type = other RNA
ggactccgcctcaacgtgagc

SEQ ID NO: 5986 - RNA, 21 nt, synthetic construct
  source 1..21: mol_type = other RNA
gcgttgagtgctggtcagaag

SEQ ID NO: 5987 - RNA, 21 nt, synthetic construct
  source 1..21: mol_type = other RNA
ctcttcggagcccacagcgtg

SEQ ID NO: 5988 - DNA, 21 bp, synthetic construct
  source 1..21: mol_type = other DNA
aacagcggcgaaaacagactg

SEQ ID NO: 5989 - RNA, 21 nt, synthetic construct
  source 1..21: mol_type = other RNA
cccagagtggacgtgaacaga

SEQ ID NO: 5990 - DNA, 21 bp, synthetic construct
  source 1..21: mol_type = other DNA
gttaagagatatggggcgttg

SEQ ID NO: 5991 - RNA, 21 nt, synthetic construct
  source 1..21: mol_type = other RNA
ctgcaccacgctacaaaagaa

SEQ ID NO: 5992 - RNA, 21 nt, synthetic construct
  source 1..21: mol_type = other RNA
aaggatcctggttctgaggtg

SEQ ID NO: 5993 - DNA, 21 bp, synthetic construct
  source 1..21: mol_type = other DNA
ggactctcacaaaaaaagacc

SEQ ID NO: 5994 - DNA, 21 bp, synthetic construct
  source 1..21: mol_type = other DNA
cggagagagaggacggagcat

SEQ ID NO: 5995 - RNA, 21 nt, synthetic construct
  source 1..21: mol_type = other RNA
ctgatcagcgccaagctggag

SEQ ID NO: 5996 - RNA, 21 nt, synthetic construct
  source 1..21: mol_type = other RNA
ggccaagaacgtgtacctatg

SEQ ID NO: 5997 - RNA, 21 nt, synthetic construct
  source 1..21: mol_type = other RNA
aatatgaatacttctgataat

SEQ ID NO: 5998 - RNA, 21 nt, synthetic construct
  source 1..21: mol_type = other RNA
cctagtgttgatgttaatcgt

SEQ ID NO: 5999 - RNA, 21 nt, synthetic construct
  source 1..21: mol_type = other RNA
cccagagtggacgtgaacagc

SEQ ID NO: 6000 - DNA, 21 bp, synthetic construct
  source 1..21: mol_type = other DNA
attattaataatttgcagatg

SEQ ID NO: 6001 - protein, 7 aa, synthetic construct
VKIYGAL

SEQ ID NO: 6002 - protein, 7 aa, synthetic construct
PTRGENE

SEQ ID NO: 6003 - protein, 7 aa, synthetic construct
DVENPGK

SEQ ID NO: 6004 - protein, 7 aa, synthetic construct
AATGIKL

SEQ ID NO: 6005 - protein, 7 aa, synthetic construct
IGQGVSV

SEQ ID NO: 6006 - protein, 7 aa, synthetic construct
VNASAAN

SEQ ID NO: 6007 - protein, 7 aa, synthetic construct
RTSNSDV

SEQ ID NO: 6008 - protein, 7 aa, synthetic construct
SLGNIQS

SEQ ID NO: 6009 - protein, 7 aa, synthetic construct
NRNTSEK

SEQ ID NO: 6010 - protein, 7 aa, synthetic construct
QTSSDTR

SEQ ID NO: 6011 - protein, 7 aa, synthetic construct
VKVYGAL

SEQ ID NO: 6012 - protein, 7 aa, synthetic construct
QIRGTEM

SEQ ID NO: 6013 - protein, 7 aa, synthetic construct
VAREEHM

SEQ ID NO: 6014 - protein, 7 aa, synthetic construct
GTLPNKA

SEQ ID NO: 6015 - protein, 7 aa, synthetic construct
AMRLSEG

SEQ ID NO: 6016 - protein, 7 aa, synthetic construct
DVKSDTQ

SEQ ID NO: 6017 - protein, 7 aa, synthetic construct
GTGMAVK

SEQ ID NO: 6018 - protein, 7 aa, synthetic construct
TSSPPVV

SEQ ID NO: 6019 - protein, 7 aa, synthetic construct
NGQGVSF

SEQ ID NO: 6020 - protein, 7 aa, synthetic construct
GRHNETP

SEQ ID NO: 6021 - protein, 7 aa, synthetic construct
GSMQTQN

SEQ ID NO: 6022 - protein, 7 aa, synthetic construct
GMQDVRI

SEQ ID NO: 6023 - protein, 7 aa, synthetic construct
MMKTETG

SEQ ID NO: 6024 - protein, 7 aa, synthetic construct
ASTGIKL

SEQ ID NO: 6025 - protein, 7 aa, synthetic construct
VFQQGHV

SEQ ID NO: 6026 - protein, 7 aa, synthetic construct
QTTGGSS

SEQ ID NO: 6027 - protein, 7 aa, synthetic construct
QIKPIER

SEQ ID NO: 6028 - protein, 7 aa, synthetic construct
IGAMGGL

SEQ ID NO: 6029 - protein, 7 aa, synthetic construct
GSKLATP

SEQ ID NO: 6030 - protein, 7 aa, synthetic construct
PGLSGKV

SEQ ID NO: 6031 - protein, 7 aa, synthetic construct
GVVNADR

SEQ ID NO: 6032 - protein, 7 aa, synthetic construct
LKVAGLT

SEQ ID NO: 6033 - protein, 7 aa, synthetic construct
ARNVTEG

SEQ ID NO: 6034 - protein, 7 aa, synthetic construct
VNVQAER

SEQ ID NO: 6035 - protein, 7 aa, synthetic construct
GSLTQTH

SEQ ID NO: 6036 - protein, 7 aa, synthetic construct
ERSGLGM

SEQ ID NO: 6037 - protein, 7 aa, synthetic construct
GIMRTQN

SEQ ID NO: 6038 - protein, 7 aa, synthetic construct
GVSGRDQ

SEQ ID NO: 6039 - protein, 7 aa, synthetic construct
NSSVVKS

SEQ ID NO: 6040 - protein, 7 aa, synthetic construct
TISHVTN

SEQ ID NO: 6041 - protein, 7 aa, synthetic construct
HVVAVGV

SEQ ID NO: 6042 - protein, 7 aa, synthetic construct
MINRATT

SEQ ID NO: 6043 - protein, 7 aa, synthetic construct
PKPETAL

SEQ ID NO: 6044 - protein, 7 aa, synthetic construct
VSDSSNR

SEQ ID NO: 6045 - protein, 7 aa, synthetic construct
GTIGNGF

SEQ ID NO: 6046 - protein, 7 aa, synthetic construct
TISPSSS

SEQ ID NO: 6047 - protein, 7 aa, synthetic construct
ETATKSI

SEQ ID NO: 6048 - protein, 7 aa, synthetic construct
YQGAESR

SEQ ID NO: 6049 - protein, 7 aa, synthetic construct
KAIDGIV

SEQ ID NO: 6050 - protein, 7 aa, synthetic construct
ADRTRDG

SEQ ID NO: 6051 - protein, 7 aa, synthetic construct
RSDVVSD

SEQ ID NO: 6052 - protein, 7 aa, synthetic construct
SGRNNSV

SEQ ID NO: 6053 - protein, 7 aa, synthetic construct
LVKDVSQ

SEQ ID NO: 6054 - protein, 7 aa, synthetic construct
PYDSPTS

SEQ ID NO: 6055 - protein, 7 aa, synthetic construct
PNNLHSS

SEQ ID NO: 6056 - protein, 7 aa, synthetic construct
IGVGTKS

SEQ ID NO: 6057 - protein, 7 aa, synthetic construct
VDKSLVR

SEQ ID NO: 6058 - protein, 7 aa, synthetic construct
IGRIVNE

SEQ ID NO: 6059 - protein, 7 aa, synthetic construct
NRNTREK

SEQ ID NO: 6060 - protein, 7 aa, synthetic construct
QTSSDTS

SEQ ID NO: 6061 - protein, 7 aa, synthetic construct
VGSVRMD

SEQ ID NO: 6062 - protein, 7 aa, synthetic construct
AMRLREG

SEQ ID NO: 6063 - protein, 7 aa, synthetic construct
AMRLSDG

SEQ ID NO: 6064 - protein, 7 aa, synthetic construct
CQGAESR

SEQ ID NO: 6065 - protein, 7 aa, synthetic construct
GGLPIAS

SEQ ID NO: 6066 - protein, 7 aa, synthetic construct
PTRGENM

SEQ ID NO: 6067 - protein, 7 aa, synthetic construct
PYNHPTS

SEQ ID NO: 6068 - protein, 7 aa, synthetic construct
AMRLSER

SEQ ID NO: 6069 - protein, 7 aa, synthetic construct
PNLQQSQ

SEQ ID NO: 6070 - protein, 7 aa, synthetic construct
SVTGGQL

SEQ ID NO: 6071 - protein, 7 aa, synthetic construct
REKTEGL

SEQ ID NO: 6072 - protein, 7 aa, synthetic construct
NRNTSDI

SEQ ID NO: 6073 - protein, 7 aa, synthetic construct
QTSSETR

SEQ ID NO: 6074 - protein, 7 aa, synthetic construct
DVKSDTK

SEQ ID NO: 6075 - protein, 7 aa, synthetic construct
MTIGNGF

SEQ ID NO: 6076 - protein, 7 aa, synthetic construct
PTRGENL

SEQ ID NO: 6077 - protein, 7 aa, synthetic construct
HTSSDTR

SEQ ID NO: 6078 - protein, 7 aa, synthetic construct
ALRLSEG

SEQ ID NO: 6079 - protein, 7 aa, synthetic construct
TSSPPLV

SEQ ID NO: 6080 - protein, 7 aa, synthetic construct
QTSRDTR

SEQ ID NO: 6081 - protein, 7 aa, synthetic construct
RNAPNMD

SEQ ID NO: 6082 - protein, 7 aa, synthetic construct
VAREEHI

SEQ ID NO: 6083 - protein, 7 aa, synthetic construct
RDGVILI

SEQ ID NO: 6084 - protein, 7 aa, synthetic construct
GSNLTTP

SEQ ID NO: 6085 - protein, 7 aa, synthetic construct
GSIQTQN

SEQ ID NO: 6086 - protein, 7 aa, synthetic construct
QTSSDTG

SEQ ID NO: 6087 - protein, 7 aa, synthetic construct
TIRQVNM

SEQ ID NO: 6088 - protein, 7 aa, synthetic construct
SLVQNAD

SEQ ID NO: 6089 - protein, 7 aa, synthetic construct
DAREEHM

SEQ ID NO: 6090 - protein, 7 aa, synthetic construct
IMNGMVL

SEQ ID NO: 6091 - protein, 7 aa, synthetic construct
VFQQVHV

SEQ ID NO: 6092 - protein, 7 aa, synthetic construct
PGRETTT

SEQ ID NO: 6093 - protein, 7 aa, synthetic construct
AIRLSEG

SEQ ID NO: 6094 - protein, 7 aa, synthetic construct
VARDEHM

SEQ ID NO: 6095 - protein, 7 aa, synthetic construct
PKSETVL

SEQ ID NO: 6096 - protein, 7 aa, synthetic construct
GTNSEIV

SEQ ID NO: 6097 - protein, 7 aa, synthetic construct
QLSNTST

SEQ ID NO: 6098 - protein, 7 aa, synthetic construct
QTSSDSR

SEQ ID NO: 6099 - protein, 7 aa, synthetic construct
QVKSTET

SEQ ID NO: 6100 - protein, 7 aa, synthetic construct
TSRPPVV

SEQ ID NO: 6101 - protein, 7 aa, synthetic construct
VHAPGTH

SEQ ID NO: 6102 - protein, 7 aa, synthetic construct
GTGIAVK

SEQ ID NO: 6103 - protein, 7 aa, synthetic construct
PSRGENV

SEQ ID NO: 6104 - protein, 7 aa, synthetic construct
NGQGVSL

SEQ ID NO: 6105 - protein, 7 aa, synthetic construct
RHVHSKD

SEQ ID NO: 6106 - protein, 7 aa, synthetic construct
RTGNSDI

SEQ ID NO: 6107 - protein, 7 aa, synthetic construct
TSSPPVL

SEQ ID NO: 6108 - protein, 7 aa, synthetic construct
VAREDHM

SEQ ID NO: 6109 - protein, 7 aa, synthetic construct
ATRLSEV

SEQ ID NO: 6110 - protein, 7 aa, synthetic construct
VAREEQM

SEQ ID NO: 6111 - protein, 7 aa, synthetic construct
VLQQGHV

SEQ ID NO: 6112 - protein, 7 aa, synthetic construct
NRKTSEK

SEQ ID NO: 6113 - protein, 7 aa, synthetic construct
TSKPGTY

SEQ ID NO: 6114 - protein, 7 aa, synthetic construct
DNMTKHV

SEQ ID NO: 6115 - protein, 7 aa, synthetic construct
GYGDNQH

SEQ ID NO: 6116 - protein, 7 aa, synthetic construct
NRNTSDK

SEQ ID NO: 6117 - protein, 7 aa, synthetic construct
NGHGVSF

SEQ ID NO: 6118 - protein, 7 aa, synthetic construct
MMKTETR

SEQ ID NO: 6119 - protein, 7 aa, synthetic construct
SESRQED

SEQ ID NO: 6120 - protein, 7 aa, synthetic construct
SGQSGKV

SEQ ID NO: 6121 - protein, 7 aa, synthetic construct
TGYADHS

SEQ ID NO: 6122 - protein, 7 aa, synthetic construct
DISAKHE

SEQ ID NO: 6123 - protein, 7 aa, synthetic construct
NKNTSDN

SEQ ID NO: 6124 - protein, 7 aa, synthetic construct
VRDSSNR

SEQ ID NO: 6125 - protein, 7 aa, synthetic construct
NRNTSEN

SEQ ID NO: 6126 - protein, 7 aa, synthetic construct
MIKTETG

SEQ ID NO: 6127 - protein, 7 aa, synthetic construct
AKRLSEG

SEQ ID NO: 6128 - protein, 7 aa, synthetic construct
VSDSSNS

SEQ ID NO: 6129 - protein, 7 aa, synthetic construct
GNNLATP

SEQ ID NO: 6130 - protein, 7 aa, synthetic construct
SSQKTSL

SEQ ID NO: 6131 - protein, 7 aa, synthetic construct
IMKTETG

SEQ ID NO: 6132 - protein, 7 aa, synthetic construct
MNRGGEQ

SEQ ID NO: 6133 - protein, 7 aa, synthetic construct
TGLAVHS

SEQ ID NO: 6134 - protein, 7 aa, synthetic construct
AGSESAI

SEQ ID NO: 6135 - protein, 7 aa, synthetic construct
IRDQTAI

SEQ ID NO: 6136 - protein, 7 aa, synthetic construct
PTRGEKE

SEQ ID NO: 6137 - protein, 7 aa, synthetic construct
GTYSEMV

SEQ ID NO: 6138 - protein, 7 aa, synthetic construct
SVNGITN

SEQ ID NO: 6139 - protein, 7 aa, synthetic construct
SGTQDTR

SEQ ID NO: 6140 - protein, 7 aa, synthetic construct
QTTSDTR

SEQ ID NO: 6141 - protein, 7 aa, synthetic construct
VSESSNR

SEQ ID NO: 6142 - protein, 7 aa, synthetic construct
VNHGGEP

SEQ ID NO: 6143 - protein, 7 aa, synthetic construct
TSSHPVV

SEQ ID NO: 6144 - protein, 7 aa, synthetic construct
VQKGILI

SEQ ID NO: 6145 - protein, 7 aa, synthetic construct
SSAMGGL

SEQ ID NO: 6146 - protein, 6 aa, synthetic construct
QGAESR

SEQ ID NO: 6147 - protein, 7 aa, synthetic construct
VAREEHK

SEQ ID NO: 6148 - protein, 7 aa, synthetic construct
NRNSSEK

SEQ ID NO: 6149 - protein, 7 aa, synthetic construct
SGVSEAR

SEQ ID NO: 6150 - protein, 7 aa, synthetic construct
TNQQDIM

SEQ ID NO: 6151 - protein, 7 aa, synthetic construct
GSMKTQN

SEQ ID NO: 6152 - protein, 7 aa, synthetic construct
IKETMKL

SEQ ID NO: 6153 - protein, 7 aa, synthetic construct
GYAHQDA

SEQ ID NO: 6154 - protein, 7 aa, synthetic construct
VSDSRNR

SEQ ID NO: 6155 - protein, 7 aa, synthetic construct
SIGGMVN

SEQ ID NO: 6156 - protein, 7 aa, synthetic construct
SVTGGRS

SEQ ID NO: 6157 - protein, 7 aa, synthetic construct
RSEVVSD

SEQ ID NO: 6158 - protein, 7 aa, synthetic construct
AMRHSEG

SEQ ID NO: 6159 - protein, 7 aa, synthetic construct
IGAIGGL

SEQ ID NO: 6160 - protein, 7 aa, synthetic construct
GVVNAER

SEQ ID NO: 6161 - protein, 7 aa, synthetic construct
MMKSETG

SEQ ID NO: 6162 - protein, 7 aa, synthetic construct
GIQDVRI

SEQ ID NO: 6163 - protein, 7 aa, synthetic construct
QTTGRSS

SEQ ID NO: 6164 - protein, 7 aa, synthetic construct
RNQNNSQ

SEQ ID NO: 6165 - protein, 7 aa, synthetic construct
QTTRGSS

SEQ ID NO: 6166 - protein, 7 aa, synthetic construct
VKIYGDL

SEQ ID NO: 6167 - protein, 7 aa, synthetic construct
KRNTSEK

SEQ ID NO: 6168 - protein, 7 aa, synthetic construct
DDGKYIR

SEQ ID NO: 6169 - protein, 7 aa, synthetic construct
GQARVPT

SEQ ID NO: 6170 - protein, 7 aa, synthetic construct
ADRSRDG

SEQ ID NO: 6171 - protein, 7 aa, synthetic construct
VERGVTP

SEQ ID NO: 6172 - protein, 7 aa, synthetic construct
RSDVVRD

SEQ ID NO: 6173 - protein, 7 aa, synthetic construct
DKIYGAL

SEQ ID NO: 6174 - protein, 7 aa, synthetic construct
NSNTSEK

SEQ ID NO: 6175 - protein, 7 aa, synthetic construct
KGQGVSF

SEQ ID NO: 6176 - protein, 7 aa, synthetic construct
AMSLSEG

SEQ ID NO: 6177 - protein, 7 aa, synthetic construct
RKEPMIL

SEQ ID NO: 6178 - protein, 7 aa, synthetic construct
DDDSTTG

SEQ ID NO: 6179 - protein, 7 aa, synthetic construct
GGVSEGR

SEQ ID NO: 6180 - protein, 7 aa, synthetic construct
SRDDTVF

SEQ ID NO: 6181 - protein, 7 aa, synthetic construct
PGSSKVN

SEQ ID NO: 6182 - protein, 7 aa, synthetic construct
PGLRGKV

SEQ ID NO: 6183 - protein, 7 aa, synthetic construct
VSDSSKR

SEQ ID NO: 6184 - protein, 7 aa, synthetic construct
MMKTDTG

SEQ ID NO: 6185 - protein, 7 aa, synthetic construct
KIDTFKV

SEQ ID NO: 6186 - protein, 7 aa, synthetic construct
MMNTETG

SEQ ID NO: 6187 - protein, 7 aa, synthetic construct
NGQGVSI

SEQ ID NO: 6188 - protein, 7 aa, synthetic construct
GVSGSDQ

SEQ ID NO: 6189 - protein, 7 aa, synthetic construct
GTGMALK

SEQ ID NO: 6190 - protein, 7 aa, synthetic construct
QIRGSEM

SEQ ID NO: 6191 - protein, 7 aa, synthetic construct
SSEKIPR

SEQ ID NO: 6192 - protein, 7 aa, synthetic construct
VTQAQAQ

SEQ ID NO: 6193 - protein, 7 aa, synthetic construct
LSDSSNR

SEQ ID NO: 6194 - protein, 7 aa, synthetic construct
GVVKADR

SEQ ID NO: 6195 - protein, 7 aa, synthetic construct
GNKLHID

SEQ ID NO: 6196 - protein, 7 aa, synthetic construct
GYGLTGN

SEQ ID NO: 6197 - protein, 7 aa, synthetic construct
KMTGGDF

SEQ ID NO: 6198 - protein, 7 aa, synthetic construct
NGQGVSY

SEQ ID NO: 6199 - protein, 7 aa, synthetic construct
QRSTSVG

SEQ ID NO: 6200 - protein, 7 aa, synthetic construct
SGERNQE

SEQ ID NO: 6201 - protein, 7 aa, synthetic construct
AERTRDG

SEQ ID NO: 6202 - protein, 7 aa, synthetic construct
HVKSYDT

SEQ ID NO: 6203 - protein, 7 aa, synthetic construct
QVVAVGV

SEQ ID NO: 6204 - protein, 7 aa, synthetic construct
GLVNADR

SEQ ID NO: 6205 - protein, 7 aa, synthetic construct
PSVNLGV

SEQ ID NO: 6206 - protein, 7 aa, synthetic construct
QIRGTEI

SEQ ID NO: 6207 - protein, 7 aa, synthetic construct
QIYNTAH

SEQ ID NO: 6208 - protein, 7 aa, synthetic construct
VLGAHSV

SEQ ID NO: 6209 - protein, 7 aa, synthetic construct
TMSSADR

SEQ ID NO: 6210 - protein, 7 aa, synthetic construct
MINRVST

SEQ ID NO: 6211 - protein, 7 aa, synthetic construct
SKVQNVD

SEQ ID NO: 6212 - protein, 7 aa, synthetic construct
HAPPAMV

SEQ ID NO: 6213 - protein, 7 aa, synthetic construct
EKSPPVM

SEQ ID NO: 6214 - protein, 7 aa, synthetic construct
TSSPPVE

SEQ ID NO: 6215 - protein, 7 aa, synthetic construct
AKAPEAG

SEQ ID NO: 6216 - protein, 7 aa, synthetic construct
VSDRSNR

SEQ ID NO: 6217 - protein, 7 aa, synthetic construct
IRQGVSV

SEQ ID NO: 6218 - protein, 7 aa, synthetic construct
DLSRHTL

SEQ ID NO: 6219 - protein, 7 aa, synthetic construct
FVKDVSQ

SEQ ID NO: 6220 - protein, 7 aa, synthetic construct
PTRGESV

SEQ ID NO: 6221 - protein, 7 aa, synthetic construct
GSLQTQN

SEQ ID NO: 6222 - protein, 7 aa, synthetic construct
QKSSDTR

SEQ ID NO: 6223 - protein, 7 aa, synthetic construct
GIAIVEN

SEQ ID NO: 6224 - protein, 7 aa, synthetic construct
GVNSTLQ

SEQ ID NO: 6225 - protein, 7 aa, synthetic construct
GSMQTQK

SEQ ID NO: 6226 - protein, 7 aa, synthetic construct
DSRALTE

SEQ ID NO: 6227 - protein, 7 aa, synthetic construct
DKAPETG

SEQ ID NO: 6228 - protein, 7 aa, synthetic construct
GMQDLRI

SEQ ID NO: 6229 - protein, 7 aa, synthetic construct
SESRQEE

SEQ ID NO: 6230 - protein, 7 aa, synthetic construct
AMRRSEG

SEQ ID NO: 6231 - protein, 7 aa, synthetic construct
DVENHGK

SEQ ID NO: 6232 - protein, 7 aa, synthetic construct
NGVSSAM

SEQ ID NO: 6233 - protein, 7 aa, synthetic construct
QVLKNGA

SEQ ID NO: 6234 - protein, 7 aa, synthetic construct
QTTGGSR

SEQ ID NO: 6235 - protein, 7 aa, synthetic construct
HIRGTEM

SEQ ID NO: 6236 - protein, 7 aa, synthetic construct
NGQGVSV

SEQ ID NO: 6237 - protein, 7 aa, synthetic construct
PGLSGKL

SEQ ID NO: 6238 - protein, 7 aa, synthetic construct
RVVNADR

SEQ ID NO: 6239 - protein, 7 aa, synthetic construct
GYENNQH

SEQ ID NO: 6240 - protein, 7 aa, synthetic construct
SMNGVTN

SEQ ID NO: 6241 - protein, 7 aa, synthetic construct
SERRQED

SEQ ID NO: 6242 - protein, 7 aa, synthetic construct
GMQEVRI

SEQ ID NO: 6243 - protein, 7 aa, synthetic construct
HGLSGKV

SEQ ID NO: 6244 - protein, 7 aa, synthetic construct
SRTESSQ

SEQ ID NO: 6245 - protein, 7 aa, synthetic construct
GSMQKQN

SEQ ID NO: 6246 - protein, 7 aa, synthetic construct
VFQQRHV

SEQ ID NO: 6247 - protein, 7 aa, synthetic construct
ASTGINL

SEQ ID NO: 6248 - protein, 7 aa, synthetic construct
GTGMAEK

SEQ ID NO: 6249 - protein, 7 aa, synthetic construct
SESRHED

SEQ ID NO: 6250 - protein, 7 aa, synthetic construct
VARQEHM

SEQ ID NO: 6251 - protein, 7 aa, synthetic construct
PGLSGNV

SEQ ID NO: 6252 - protein, 7 aa, synthetic construct
QTSTDTR

SEQ ID NO: 6253 - protein, 7 aa, synthetic construct
HTRGENE

SEQ ID NO: 6254 - protein, 7 aa, synthetic construct
GFAHQDA

SEQ ID NO: 6255 - protein, 7 aa, synthetic construct
EKSPTVM

SEQ ID NO: 6256 - protein, 7 aa, synthetic construct
QTKVDSV

SEQ ID NO: 6257 - protein, 7 aa, synthetic construct
SQAAESH

SEQ ID NO: 6258 - protein, 7 aa, synthetic construct
TSSPPLC

SEQ ID NO: 6259 - protein, 7 aa, synthetic construct
PENTKIN

SEQ ID NO: 6260 - protein, 7 aa, synthetic construct
RSDVVSE

SEQ ID NO: 6261 - protein, 7 aa, synthetic construct
TSSPTVV

SEQ ID NO: 6262 - protein, 7 aa, synthetic construct
RSDLVSD

SEQ ID NO: 6263 - protein, 7 aa, synthetic construct
TSSTPVV

SEQ ID NO: 6264 - protein, 7 aa, synthetic construct
DKNASTG

SEQ ID NO: 6265 - protein, 7 aa, synthetic construct
VGSVRID

SEQ ID NO: 6266 - protein, 7 aa, synthetic construct
AMRVSEG

SEQ ID NO: 6267 - protein, 7 aa, synthetic construct
GSHNETP

SEQ ID NO: 6268 - protein, 7 aa, synthetic construct
TSHQVSM

SEQ ID NO: 6269 - protein, 7 aa, synthetic construct
TSSPPLL

SEQ ID NO: 6270 - protein, 7 aa, synthetic construct
VKINGAL

SEQ ID NO: 6271 - protein, 7 aa, synthetic construct
GVIKTLL

SEQ ID NO: 6272 - protein, 7 aa, synthetic construct
SESSQED

SEQ ID NO: 6273 - protein, 7 aa, synthetic construct
TSSPPLF

SEQ ID NO: 6274 - protein, 7 aa, synthetic construct
RSDVLSD

SEQ ID NO: 6275 - protein, 7 aa, synthetic construct
VLSPNIA

SEQ ID NO: 6276 - protein, 7 aa, synthetic construct
GLVQNVD

SEQ ID NO: 6277 - protein, 7 aa, synthetic construct
TGKGVEL

SEQ ID NO: 6278 - protein, 7 aa, synthetic construct
TINKVII

SEQ ID NO: 6279 - protein, 7 aa, synthetic construct
SGRNNSL

SEQ ID NO: 6280 - protein, 7 aa, synthetic construct
TTRGENE

SEQ ID NO: 6281 - protein, 7 aa, synthetic construct
TIERTAN

SEQ ID NO: 6282 - protein, 7 aa, synthetic construct
FGYGSNN

SEQ ID NO: 6283 - protein, 7 aa, synthetic construct
GMSRVSD

SEQ ID NO: 6284 - protein, 7 aa, synthetic construct
SYLPQVT

SEQ ID NO: 6285 - protein, 7 aa, synthetic construct
IGQGVSL

SEQ ID NO: 6286 - protein, 7 aa, synthetic construct
GLGGPRE

SEQ ID NO: 6287 - protein, 7 aa, synthetic construct
QTYSDTR

SEQ ID NO: 6288 - protein, 7 aa, synthetic construct
VIATKSI

SEQ ID NO: 6289 - protein, 7 aa, synthetic construct
GQSRVPM

SEQ ID NO: 6290 - protein, 7 aa, synthetic construct
GTGMAVN

SEQ ID NO: 6291 - protein, 7 aa, synthetic construct
VFQQGQV

SEQ ID NO: 6292 - protein, 6 aa, synthetic construct
AATGIK

SEQ ID NO: 6293 - protein, 7 aa, synthetic construct
RSVWTEQ

SEQ ID NO: 6294 - protein, 7 aa, synthetic construct
VISAKHE

SEQ ID NO: 6295 - protein, 7 aa, synthetic construct
TRSPPVV

SEQ ID NO: 6296 - protein, 7 aa, synthetic construct
AMRLSGG

SEQ ID NO: 6297 - protein, 7 aa, synthetic construct
PTRRENE

SEQ ID NO: 6298 - protein, 7 aa, synthetic construct
RNYSTLV

SEQ ID NO: 6299 - protein, 7 aa, synthetic construct
SSQKNKP

SEQ ID NO: 6300 - protein, 7 aa, synthetic construct
TSSPPEV

SEQ ID NO: 6301 - protein, 7 aa, synthetic construct
ADRTSDG

SEQ ID NO: 6302 - protein, 7 aa, synthetic construct
KMKTETG

SEQ ID NO: 6303 - protein, 7 aa, synthetic construct
IGKQTYD

SEQ ID NO: 6304 - protein, 7 aa, synthetic construct
LNVAGLM

SEQ ID NO: 6305 - protein, 7 aa, synthetic construct
IGQGVRV

SEQ ID NO: 6306 - protein, 7 aa, synthetic construct
PSRGENE

SEQ ID NO: 6307 - protein, 7 aa, synthetic construct
KVEFNRV

SEQ ID NO: 6308 - protein, 7 aa, synthetic construct
PNLQQRQ

SEQ ID NO: 6309 - protein, 7 aa, synthetic construct
KDRNDNA

SEQ ID NO: 6310 - protein, 7 aa, synthetic construct
TETGTLL

SEQ ID NO: 6311 - protein, 7 aa, synthetic construct
QTSSHTR

SEQ ID NO: 6312 - protein, 7 aa, synthetic construct
VSMQTQN

SEQ ID NO: 6313 - protein, 7 aa, synthetic construct
VASEEHM

SEQ ID NO: 6314 - protein, 7 aa, synthetic construct
TLLPGYL

SEQ ID NO: 6315 - protein, 7 aa, synthetic construct
TLNGAYK

SEQ ID NO: 6316 - protein, 7 aa, synthetic construct
ADRTRDR

SEQ ID NO: 6317 - protein, 7 aa, synthetic construct
TIERTAM

SEQ ID NO: 6318 - protein, 7 aa, synthetic construct
VDREEHM

SEQ ID NO: 6319 - protein, 7 aa, synthetic construct
NRSVVKS

SEQ ID NO: 6320 - protein, 7 aa, synthetic construct
QDGSSTV

SEQ ID NO: 6321 - protein, 7 aa, synthetic construct
PTRGVNV

SEQ ID NO: 6322 - protein, 7 aa, synthetic construct
QIKPIDR

SEQ ID NO: 6323 - protein, 7 aa, synthetic construct
PTRGENQ

SEQ ID NO: 6324 - protein, 7 aa, synthetic construct
MYYERTI

SEQ ID NO: 6325 - protein, 7 aa, synthetic construct
QIKQIER

SEQ ID NO: 6326 - protein, 7 aa, synthetic construct
TGKGIVL

SEQ ID NO: 6327 - protein, 7 aa, synthetic construct
VSQEPSR

SEQ ID NO: 6328 - protein, 7 aa, synthetic construct
IGQRVSV

SEQ ID NO: 6329 - protein, 7 aa, synthetic construct
TSSPHVV

SEQ ID NO: 6330 - protein, 6 aa, synthetic construct
VKIGAL

SEQ ID NO: 6331 - protein, 7 aa, synthetic construct
TSSPPWC

SEQ ID NO: 6332 - protein, 7 aa, synthetic construct
TRSPPVS

SEQ ID NO: 6333 - protein, 7 aa, synthetic construct
NINTSEK

SEQ ID NO: 6334 - protein, 7 aa, synthetic construct
AMRLSQG

SEQ ID NO: 6335 - protein, 7 aa, synthetic construct
TIHQGIK

SEQ ID NO: 6336 - protein, 7 aa, synthetic construct
EIKDRVL

SEQ ID NO: 6337 - protein, 7 aa, synthetic construct
SESRQDD

SEQ ID NO: 6338 - protein, 7 aa, synthetic construct
NRKTREK

SEQ ID NO: 6339 - protein, 7 aa, synthetic construct
QISGTEM

SEQ ID NO: 6340 - protein, 7 aa, synthetic construct
RDRWNSE

SEQ ID NO: 6341 - protein, 7 aa, synthetic construct
QINPIER

SEQ ID NO: 6342 - protein, 7 aa, synthetic construct
VENGVDK

SEQ ID NO: 6343 - protein, 7 aa, synthetic construct
QIKTIER

SEQ ID NO: 6344 - protein, 7 aa, synthetic construct
QTSRETR

SEQ ID NO: 6345 - protein, 7 aa, synthetic construct
NGQGDSF

SEQ ID NO: 6346 - protein, 7 aa, synthetic construct
AMRLVRG

SEQ ID NO: 6347 - protein, 7 aa, synthetic construct
AGTGIKL

SEQ ID NO: 6348 - protein, 7 aa, synthetic construct
DVENTGK

SEQ ID NO: 6349 - protein, 7 aa, synthetic construct
IRAMGGL

SEQ ID NO: 6350 - protein, 7 aa, synthetic construct
GSKLATH

SEQ ID NO: 6351 - protein, 7 aa, synthetic construct
TISPSSR

SEQ ID NO: 6352 - protein, 7 aa, synthetic construct
AMRLSEA

SEQ ID NO: 6353 - protein, 7 aa, synthetic construct
GQMRSDV

SEQ ID NO: 6354 - protein, 7 aa, synthetic construct
PRLDVNR

SEQ ID NO: 6355 - protein, 7 aa, synthetic construct
NSGDKQL

SEQ ID NO: 6356 - protein, 7 aa, synthetic construct
GLSGRDQ

SEQ ID NO: 6357 - protein, 7 aa, synthetic construct
ARKVTEG

SEQ ID NO: 6358 - protein, 7 aa, synthetic construct
GYMQTQN

SEQ ID NO: 6359 - protein, 7 aa, synthetic construct
VIQQGHV

SEQ ID NO: 6360 - protein, 7 aa, synthetic construct
RHVHSND

SEQ ID NO: 6361 - protein, 7 aa, synthetic construct
SKNGITN

SEQ ID NO: 6362 - protein, 7 aa, synthetic construct
QIRGTDM

SEQ ID NO: 6363 - protein, 7 aa, synthetic construct
TISPRSS

SEQ ID NO: 6364 - protein, 7 aa, synthetic construct
GARGEHM

SEQ ID NO: 6365 - protein, 7 aa, synthetic construct
GIQANAH

SEQ ID NO: 6366 - protein, 7 aa, synthetic construct
EKGPHIA

SEQ ID NO: 6367 - protein, 7 aa, synthetic construct
GSLTQTQ

SEQ ID NO: 6368 - protein, 7 aa, synthetic construct
GSLSQTH

SEQ ID NO: 6369 - protein, 7 aa, synthetic construct
GSMQTKN

SEQ ID NO: 6370 - protein, 6 aa, synthetic construct
GGDNQH

SEQ ID NO: 6371 - protein, 7 aa, synthetic construct
DLRTSTL

SEQ ID NO: 6372 - protein, 7 aa, synthetic construct
EYGAHSV

SEQ ID NO: 6373 - protein, 7 aa, synthetic construct
GYGFSGN

SEQ ID NO: 6374 - protein, 7 aa, synthetic construct
RSLTQTH

SEQ ID NO: 6375 - protein, 7 aa, synthetic construct
AMRLTEG

SEQ ID NO: 6376 - protein, 7 aa, synthetic construct
QTSSDTT

SEQ ID NO: 6377 - protein, 7 aa, synthetic construct
RTSNGDI

SEQ ID NO: 6378 - protein, 7 aa, synthetic construct
SDSRQED

SEQ ID NO: 6379 - protein, 7 aa, synthetic construct
NGERNQV

SEQ ID NO: 6380 - protein, 7 aa, synthetic construct
TINPSSS

SEQ ID NO: 6381 - protein, 7 aa, synthetic construct
QTSSDNR

SEQ ID NO: 6382 - protein, 7 aa, synthetic construct
RHVQSKD

SEQ ID NO: 6383 - protein, 7 aa, synthetic construct
SEKNEGL

SEQ ID NO: 6384 - protein, 7 aa, synthetic construct
GMTQKMM

SEQ ID NO: 6385 - protein, 7 aa, synthetic construct
LVKDLSQ

SEQ ID NO: 6386 - protein, 7 aa, synthetic construct
EKGPLVA

SEQ ID NO: 6387 - protein, 7 aa, synthetic construct
RSPNNSE

SEQ ID NO: 6388 - protein, 7 aa, synthetic construct
PTRGVNE

SEQ ID NO: 6389 - protein, 7 aa, synthetic construct
GRHNDTP

SEQ ID NO: 6390 - protein, 7 aa, synthetic construct
VAREENM

SEQ ID NO: 6391 - protein, 7 aa, synthetic construct
IGWNNSV

SEQ ID NO: 6392 - protein, 7 aa, synthetic construct
PTRGESE

SEQ ID NO: 6393 - protein, 7 aa, synthetic construct
IGQGLSV

SEQ ID NO: 6394 - protein, 7 aa, synthetic construct
VDQKSVT

SEQ ID NO: 6395 - protein, 7 aa, synthetic construct
GMQDVSI

SEQ ID NO: 6396 - protein, 7 aa, synthetic construct
KVVTSAM

SEQ ID NO: 6397 - protein, 7 aa, synthetic construct
ARTGIKL

SEQ ID NO: 6398 - protein, 7 aa, synthetic construct
QIRGNEM

SEQ ID NO: 6399 - protein, 7 aa, synthetic construct
ERDGNNL

SEQ ID NO: 6400 - protein, 7 aa, synthetic construct
GGAGLKD

SEQ ID NO: 6401 - protein, 7 aa, synthetic construct
RHLHSKD

SEQ ID NO: 6402 - protein, 7 aa, synthetic construct
LVKDVRQ

SEQ ID NO: 6403 - protein, 7 aa, synthetic construct
GSLTHTH

SEQ ID NO: 6404 - protein, 7 aa, synthetic construct
QVLINGA

SEQ ID NO: 6405 - protein, 7 aa, synthetic construct
ASSGIKL

SEQ ID NO: 6406 - protein, 7 aa, synthetic construct
GTGMDVK

SEQ ID NO: 6407 - protein, 7 aa, synthetic construct
PARGENE

SEQ ID NO: 6408 - protein, 7 aa, synthetic construct
DVKRDTQ

SEQ ID NO: 6409 - protein, 7 aa, synthetic construct
PTRAENE

SEQ ID NO: 6410 - protein, 7 aa, synthetic construct
SSSPPVV

SEQ ID NO: 6411 - protein, 7 aa, synthetic construct
GNENNQH

SEQ ID NO: 6412 - protein, 7 aa, synthetic construct
RHVHSKE

SEQ ID NO: 6413 - protein, 7 aa, synthetic construct
DSTGIKL

SEQ ID NO: 6414 - protein, 7 aa, synthetic construct
VKKYGAL

SEQ ID NO: 6415 - protein, 7 aa, synthetic construct
GIMRTKN

SEQ ID NO: 6416 - protein, 7 aa, synthetic construct
MKEKIIL

SEQ ID NO: 6417 - protein, 7 aa, synthetic construct
ETATKRI

SEQ ID NO: 6418 - protein, 7 aa, synthetic construct
MTIGNGL

SEQ ID NO: 6419 - protein, 7 aa, synthetic construct
RNQNNSH

SEQ ID NO: 6420 - protein, 7 aa, synthetic construct
NGQGVTF

SEQ ID NO: 6421 - protein, 7 aa, synthetic construct
KTSSDTR

SEQ ID NO: 6422 - protein, 7 aa, synthetic construct
SHVHSKD

SEQ ID NO: 6423 - protein, 7 aa, synthetic construct
VKIYGAM

SEQ ID NO: 6424 - protein, 7 aa, synthetic construct
QIRGMEV

SEQ ID NO: 6425 - protein, 7 aa, synthetic construct
RKQNNSQ

SEQ ID NO: 6426 - protein, 7 aa, synthetic construct
EMRLSEG

SEQ ID NO: 6427 - protein, 7 aa, synthetic construct
SLLKNVD

SEQ ID NO: 6428 - protein, 7 aa, synthetic construct
GRHNETT

SEQ ID NO: 6429 - protein, 7 aa, synthetic construct
RNHNNSQ

SEQ ID NO: 6430 - protein, 7 aa, synthetic construct
ETATNSI

SEQ ID NO: 6431 - protein, 7 aa, synthetic construct
DEENPGK

SEQ ID NO: 6432 - protein, 7 aa, synthetic construct
PNNLHRS

SEQ ID NO: 6433 - protein, 7 aa, synthetic construct
PTRGEND

SEQ ID NO: 6434 - protein, 7 aa, synthetic construct
GVEKADR

SEQ ID NO: 6435 - protein, 7 aa, synthetic construct
KVELNRV

SEQ ID NO: 6436 - protein, 7 aa, synthetic construct
GSMHTQN

SEQ ID NO: 6437 - protein, 7 aa, synthetic construct
RRDVVSD

SEQ ID NO: 6438 - protein, 7 aa, synthetic construct
LVKEVSQ

SEQ ID NO: 6439 - protein, 7 aa, synthetic construct
GSKQTQN

SEQ ID NO: 6440 - protein, 7 aa, synthetic construct
RNQNNRQ

SEQ ID NO: 6441 - protein, 7 aa, synthetic construct
LRVRDGY

SEQ ID NO: 6442 - protein, 7 aa, synthetic construct
QIRGTEK

SEQ ID NO: 6443 - protein, 7 aa, synthetic construct
NGQGVYF

SEQ ID NO: 6444 - protein, 7 aa, synthetic construct
YHGAESR

SEQ ID NO: 6445 - protein, 7 aa, synthetic construct
DKVGVAV

SEQ ID NO: 6446 - protein, 7 aa, synthetic construct
GSNLATP

SEQ ID NO: 6447 - protein, 7 aa, synthetic construct
IYDYSHT

SEQ ID NO: 6448 - protein, 7 aa, synthetic construct
VYQQGHV

SEQ ID NO: 6449 - protein, 7 aa, synthetic construct
GYVLKSA

SEQ ID NO: 6450 - protein, 7 aa, synthetic construct
AKEMRAL

SEQ ID NO: 6451 - protein, 7 aa, synthetic construct
RESRQED

SEQ ID NO: 6452 - protein, 7 aa, synthetic construct
AMRISEG

SEQ ID NO: 6453 - protein, 7 aa, synthetic construct
GSKLAPP

SEQ ID NO: 6454 - protein, 7 aa, synthetic construct
GMKDVRI

SEQ ID NO: 6455 - protein, 7 aa, synthetic construct
TISQVTN

SEQ ID NO: 6456 - protein, 7 aa, synthetic construct
LMNGITN

SEQ ID NO: 6457 - protein, 7 aa, synthetic construct
TIRHVTN

SEQ ID NO: 6458 - protein, 7 aa, synthetic construct
HVLAVGV

SEQ ID NO: 6459 - protein, 7 aa, synthetic construct
QIRGTEL

SEQ ID NO: 6460 - protein, 7 aa, synthetic construct
DTATKSI

SEQ ID NO: 6461 - protein, 7 aa, synthetic construct
AMNGITN

SEQ ID NO: 6462 - protein, 7 aa, synthetic construct
SSDVVSD

SEQ ID NO: 6463 - protein, 7 aa, synthetic construct
ARNVIGG

SEQ ID NO: 6464 - protein, 7 aa, synthetic construct
VFQQEHV

SEQ ID NO: 6465 - protein, 7 aa, synthetic construct
GRHKETP

SEQ ID NO: 6466 - protein, 7 aa, synthetic construct
KAIDGIL

SEQ ID NO: 6467 - protein, 7 aa, synthetic construct
PKRGENE

SEQ ID NO: 6468 - protein, 7 aa, synthetic construct
SQGPESL

SEQ ID NO: 6469 - protein, 7 aa, synthetic construct
GIIRTQN

SEQ ID NO: 6470 - protein, 7 aa, synthetic construct
NVVSSVM

SEQ ID NO: 6471 - protein, 7 aa, synthetic construct
PTRGENV

SEQ ID NO: 6472 - protein, 7 aa, synthetic construct
RLNHVDT

SEQ ID NO: 6473 - protein, 6 aa, synthetic construct
PDSPTS

SEQ ID NO: 6474 - protein, 7 aa, synthetic construct
GRLTQTH

SEQ ID NO: 6475 - protein, 7 aa, synthetic construct
NRNTTEK

SEQ ID NO: 6476 - protein, 7 aa, synthetic construct
EISAKHE

SEQ ID NO: 6477 - protein, 7 aa, synthetic construct
VGREEHM

SEQ ID NO: 6478 - protein, 7 aa, synthetic construct
GSKLDTP

SEQ ID NO: 6479 - protein, 7 aa, synthetic construct
SISHVIN

SEQ ID NO: 6480 - protein, 7 aa, synthetic construct
NNQRNPL

SEQ ID NO: 6481 - protein, 7 aa, synthetic construct
VGSLRMD

SEQ ID NO: 6482 - protein, 7 aa, synthetic construct
VTTLGAV

SEQ ID NO: 6483 - protein, 7 aa, synthetic construct
LVNDVTQ

SEQ ID NO: 6484 - protein, 7 aa, synthetic construct
GSLTQSH

SEQ ID NO: 6485 - protein, 7 aa, synthetic construct
GIQAKAN

SEQ ID NO: 6486 - protein, 7 aa, synthetic construct
GSLNNAS

SEQ ID NO: 6487 - protein, 6 aa, synthetic construct
NRNTSK

SEQ ID NO: 6488 - protein, 7 aa, synthetic construct
SESKQIA

SEQ ID NO: 6489 - protein, 7 aa, synthetic construct
DKNPATG

SEQ ID NO: 6490 - protein, 7 aa, synthetic construct
ARRLSEG

SEQ ID NO: 6491 - protein, 7 aa, synthetic construct
GVSGREQ

SEQ ID NO: 6492 - protein, 7 aa, synthetic construct
GYRDNQH

SEQ ID NO: 6493 - protein, 7 aa, synthetic construct
SMYGITN

SEQ ID NO: 6494 - protein, 7 aa, synthetic construct
GRHNETH

SEQ ID NO: 6495 - protein, 7 aa, synthetic construct
PTRGDNE

SEQ ID NO: 6496 - protein, 7 aa, synthetic construct
LAREEHM

SEQ ID NO: 6497 - protein, 7 aa, synthetic construct
TSSPPDS

SEQ ID NO: 6498 - protein, 7 aa, synthetic construct
IAVGAKS

SEQ ID NO: 6499 - protein, 7 aa, synthetic construct
MLARVVP

SEQ ID NO: 6500 - protein, 7 aa, synthetic construct
VDRTTDG

SEQ ID NO: 6501 - protein, 7 aa, synthetic construct
GESGRDQ

SEQ ID NO: 6502 - protein, 7 aa, synthetic construct
IINRATT

SEQ ID NO: 6503 - protein, 7 aa, synthetic construct
EVKSDTQ

SEQ ID NO: 6504 - protein, 7 aa, synthetic construct
QGLSGKV

SEQ ID NO: 6505 - protein, 7 aa, synthetic construct
GLQPNVS

SEQ ID NO: 6506 - protein, 7 aa, synthetic construct
ADRTREG

SEQ ID NO: 6507 - protein, 7 aa, synthetic construct
SGDSVRA

SEQ ID NO: 6508 - protein, 7 aa, synthetic construct
ETATKSN

SEQ ID NO: 6509 - protein, 7 aa, synthetic construct
TIEAPAM

SEQ ID NO: 6510 - protein, 7 aa, synthetic construct
VGSVRME

SEQ ID NO: 6511 - protein, 7 aa, synthetic construct
LGTSVGS

SEQ ID NO: 6512 - protein, 7 aa, synthetic construct
AVLPIAS

SEQ ID NO: 6513 - protein, 7 aa, synthetic construct
IGAMGGQ

SEQ ID NO: 6514 - protein, 7 aa, synthetic construct
MMKTEKG

SEQ ID NO: 6515 - protein, 7 aa, synthetic construct
GTIGNGL

SEQ ID NO: 6516 - protein, 7 aa, synthetic construct
QTSVILG

SEQ ID NO: 6517 - protein, 7 aa, synthetic construct
IGRNNSV

SEQ ID NO: 6518 - protein, 7 aa, synthetic construct
HVVAVGL

SEQ ID NO: 6519 - protein, 7 aa, synthetic construct
RHVHRKD

SEQ ID NO: 6520 - protein, 7 aa, synthetic construct
PINQVIM

SEQ ID NO: 6521 - protein, 7 aa, synthetic construct
FLNGVVL

SEQ ID NO: 6522 - protein, 7 aa, synthetic construct
SISHVTN

SEQ ID NO: 6523 - protein, 7 aa, synthetic construct
GIMRSQN

SEQ ID NO: 6524 - protein, 7 aa, synthetic construct
QTTGGTS

SEQ ID NO: 6525 - protein, 7 aa, synthetic construct
YQRAESR

SEQ ID NO: 6526 - protein, 7 aa, synthetic construct
VNHGGVQ

SEQ ID NO: 6527 - protein, 7 aa, synthetic construct
PGLSGKE

SEQ ID NO: 6528 - protein, 7 aa, synthetic construct
GSKLATT

SEQ ID NO: 6529 - protein, 7 aa, synthetic construct
PTRGGNE

SEQ ID NO: 6530 - protein, 7 aa, synthetic construct
MINRAST

SEQ ID NO: 6531 - protein, 7 aa, synthetic construct
LVSDMAK

SEQ ID NO: 6532 - protein, 7 aa, synthetic construct
LSQKTSL

SEQ ID NO: 6533 - protein, 7 aa, synthetic construct
ADTGIKL

SEQ ID NO: 6534 - protein, 7 aa, synthetic construct
RTSNSEI

SEQ ID NO: 6535 - protein, 7 aa, synthetic construct
IGLGTKS

SEQ ID NO: 6536 - protein, 7 aa, synthetic construct
VGRVRMD

SEQ ID NO: 6537 - protein, 7 aa, synthetic construct
MMKTETA

SEQ ID NO: 6538 - protein, 7 aa, synthetic construct
SISPSSS

SEQ ID NO: 6539 - protein, 7 aa, synthetic construct
PYNHPTR

SEQ ID NO: 6540 - protein, 7 aa, synthetic construct
GVSGRDH

SEQ ID NO: 6541 - protein, 7 aa, synthetic construct
YVKSSET

SEQ ID NO: 6542 - protein, 7 aa, synthetic construct
GSGMAVK

SEQ ID NO: 6543 - protein, 7 aa, synthetic construct
PNLHQSQ

SEQ ID NO: 6544 - protein, 7 aa, synthetic construct
SGSNNSV

SEQ ID NO: 6545 - protein, 7 aa, synthetic construct
QNRGTEM

SEQ ID NO: 6546 - protein, 7 aa, synthetic construct
SQGAESR

SEQ ID NO: 6547 - protein, 7 aa, synthetic construct
TIQQDNM

SEQ ID NO: 6548 - protein, 7 aa, synthetic construct
VAREQHM

SEQ ID NO: 6549 - protein, 7 aa, synthetic construct
PGMSGKV

SEQ ID NO: 6550 - protein, 7 aa, synthetic construct
YFAPEMS

SEQ ID NO: 6551 - protein, 7 aa, synthetic construct
RSDVESD

SEQ ID NO: 6552 - protein, 7 aa, synthetic construct
PTRGENK

SEQ ID NO: 6553 - protein, 7 aa, synthetic construct
KDIDGIV

SEQ ID NO: 6554 - protein, 7 aa, synthetic construct
QTTGDPV

SEQ ID NO: 6555 - protein, 7 aa, synthetic construct
ETIGNGY

SEQ ID NO: 6556 - protein, 7 aa, synthetic construct
QTTRDTR

SEQ ID NO: 6557 - protein, 7 aa, synthetic construct
RGRNNSV

SEQ ID NO: 6558 - protein, 7 aa, synthetic construct
AMRLSEV

SEQ ID NO: 6559 - protein, 7 aa, synthetic construct
AVRLSEG

SEQ ID NO: 6560 - protein, 7 aa, synthetic construct
TIRPSSS

SEQ ID NO: 6561 - protein, 7 aa, synthetic construct
KSSVVKS

SEQ ID NO: 6562 - protein, 7 aa, synthetic construct
NSSPPVV

SEQ ID NO: 6563 - protein, 7 aa, synthetic construct
IGQGVSE

SEQ ID NO: 6564 - protein, 7 aa, synthetic construct
DAREEHK

SEQ ID NO: 6565 - protein, 7 aa, synthetic construct
MLAHVVT

SEQ ID NO: 6566 - protein, 7 aa, synthetic construct
SGRNNRV

SEQ ID NO: 6567 - protein, 7 aa, synthetic construct
AMPLSEG

SEQ ID NO: 6568 - protein, 7 aa, synthetic construct
ESATKSI

SEQ ID NO: 6569 - protein, 7 aa, synthetic construct
NSSVVKY

SEQ ID NO: 6570 - protein, 7 aa, synthetic construct
SRDDTIS

SEQ ID NO: 6571 - protein, 7 aa, synthetic construct
TISHVTK

SEQ ID NO: 6572 - protein, 7 aa, synthetic construct
LSKVDSV

SEQ ID NO: 6573 - protein, 7 aa, synthetic construct
IGAKGGL

SEQ ID NO: 6574 - protein, 7 aa, synthetic construct
GYVLKSP

SEQ ID NO: 6575 - protein, 7 aa, synthetic construct
PTRGEIE

SEQ ID NO: 6576 - protein, 7 aa, synthetic construct
VKIYGAQ

SEQ ID NO: 6577 - protein, 7 aa, synthetic construct
GSQTQTH

SEQ ID NO: 6578 - protein, 7 aa, synthetic construct
MKKTETG

SEQ ID NO: 6579 - protein, 7 aa, synthetic construct
DVKNPGK

SEQ ID NO: 6580 - protein, 7 aa, synthetic construct
AMRLRDG

SEQ ID NO: 6581 - protein, 7 aa, synthetic construct
VRAPDTH

SEQ ID NO: 6582 - protein, 7 aa, synthetic construct
DAREEQM

SEQ ID NO: 6583 - protein, 7 aa, synthetic construct
IRVGTKS

SEQ ID NO: 6584 - protein, 7 aa, synthetic construct
IRNTSEK

SEQ ID NO: 6585 - protein, 7 aa, synthetic construct
TSSPPLW

SEQ ID NO: 6586 - protein, 7 aa, synthetic construct
GLTVYSH

SEQ ID NO: 6587 - protein, 7 aa, synthetic construct
QIRAMEK

SEQ ID NO: 6588 - protein, 7 aa, synthetic construct
TIHLDIM

SEQ ID NO: 6589 - protein, 7 aa, synthetic construct
SKSNETI

SEQ ID NO: 6590 - protein, 7 aa, synthetic construct
PNNLQSS

SEQ ID NO: 6591 - protein, 7 aa, synthetic construct
PTRGQNE

SEQ ID NO: 6592 - protein, 7 aa, synthetic construct
NGKGVSF

SEQ ID NO: 6593 - protein, 7 aa, synthetic construct
GYGDNQQ

SEQ ID NO: 6594 - protein, 7 aa, synthetic construct
NTNTSEK

SEQ ID NO: 6595 - protein, 7 aa, synthetic construct
QQRVSSS

SEQ ID NO: 6596 - protein, 7 aa, synthetic construct
KWTVNHE

SEQ ID NO: 6597 - protein, 7 aa, synthetic construct
PYDSPTR

SEQ ID NO: 6598 - protein, 7 aa, synthetic construct
PTRVENE

SEQ ID NO: 6599 - protein, 7 aa, synthetic construct
KTIGNGF

SEQ ID NO: 6600 - protein, 7 aa, synthetic construct
LANHTEI

SEQ ID NO: 6601 - protein, 7 aa, synthetic construct
SGRKNSV

SEQ ID NO: 6602 - protein, 7 aa, synthetic construct
GTLPNMA

SEQ ID NO: 6603 - protein, 7 aa, synthetic construct
RKDVMNV

SEQ ID NO: 6604 - protein, 7 aa, synthetic construct
PTRCENE

SEQ ID NO: 6605 - protein, 7 aa, synthetic construct
KINRATT

SEQ ID NO: 6606 - protein, 7 aa, synthetic construct
TLPNNSE

SEQ ID NO: 6607 - protein, 7 aa, synthetic construct
GYGENQH

SEQ ID NO: 6608 - protein, 7 aa, synthetic construct
PKSETLL

SEQ ID NO: 6609 - protein, 7 aa, synthetic construct
GVDNADR

SEQ ID NO: 6610 - protein, 7 aa, synthetic construct
GYEDNQH

SEQ ID NO: 6611 - protein, 7 aa, synthetic construct
AMRHREG

SEQ ID NO: 6612 - protein, 7 aa, synthetic construct
GNGMAVK

SEQ ID NO: 6613 - protein, 7 aa, synthetic construct
GSIGNGF

SEQ ID NO: 6614 - protein, 7 aa, synthetic construct
GTGKAVK

SEQ ID NO: 6615 - protein, 7 aa, synthetic construct
ARNVTER

SEQ ID NO: 6616 - protein, 7 aa, synthetic construct
YQGAETR

SEQ ID NO: 6617 - protein, 7 aa, synthetic construct
GVTGRDQ

SEQ ID NO: 6618 - protein, 7 aa, synthetic construct
REKTDGL

SEQ ID NO: 6619 - protein, 7 aa, synthetic construct
EAREEHM

SEQ ID NO: 6620 - protein, 7 aa, synthetic construct
PYDRPTS

SEQ ID NO: 6621 - protein, 7 aa, synthetic construct
GRQNETP

SEQ ID NO: 6622 - protein, 7 aa, synthetic construct
NRNTIEK

SEQ ID NO: 6623 - protein, 7 aa, synthetic construct
PTRGEDE

SEQ ID NO: 6624 - protein, 7 aa, synthetic construct
PTRGEKM

SEQ ID NO: 6625 - protein, 7 aa, synthetic construct
HDKSSEN

SEQ ID NO: 6626 - protein, 7 aa, synthetic construct
LVKDVSH

SEQ ID NO: 6627 - protein, 7 aa, synthetic construct
NGQAVSF

SEQ ID NO: 6628 - protein, 7 aa, synthetic construct
TISPSRS

SEQ ID NO: 6629 - protein, 7 aa, synthetic construct
ARNDTEG

SEQ ID NO: 6630 - protein, 7 aa, synthetic construct
YQGADSR

SEQ ID NO: 6631 - protein, 7 aa, synthetic construct
ASTGIKM

SEQ ID NO: 6632 - protein, 6 aa, synthetic construct
AGESAI

SEQ ID NO: 6633 - protein, 7 aa, synthetic construct
TIRHVNM

SEQ ID NO: 6634 - protein, 7 aa, synthetic construct
GTLPNKD

SEQ ID NO: 6635 - protein, 7 aa, synthetic construct
VFQQGNV

SEQ ID NO: 6636 - protein, 7 aa, synthetic construct
HLVAVGV

SEQ ID NO: 6637 - protein, 7 aa, synthetic construct
DEKSDTQ

SEQ ID NO: 6638 - protein, 7 aa, synthetic construct
KLGHNYG

SEQ ID NO: 6639 - protein, 7 aa, synthetic construct
TGLSGKV

SEQ ID NO: 6640 - protein, 7 aa, synthetic construct
AKRLREG

SEQ ID NO: 6641 - protein, 7 aa, synthetic construct
VLAPGTH

SEQ ID NO: 6642 - protein, 7 aa, synthetic construct
GVVNDDR

SEQ ID NO: 6643 - protein, 7 aa, synthetic construct
DLKSDTQ

SEQ ID NO: 6644 - protein, 7 aa, synthetic construct
TISHVSN

SEQ ID NO: 6645 - protein, 7 aa, synthetic construct
APTGIKS

SEQ ID NO: 6646 - protein, 7 aa, synthetic construct
TISHSSS

SEQ ID NO: 6647 - protein, 7 aa, synthetic construct
ASTGIKQ

SEQ ID NO: 6648 - protein, 7 aa, synthetic construct
QTTGGTR

SEQ ID NO: 6649 - protein, 7 aa, synthetic construct
QTTGGSG

SEQ ID NO: 6650 - protein, 7 aa, synthetic construct
DVEKPGK

SEQ ID NO: 6651 - protein, 7 aa, synthetic construct
PMRLSEG

SEQ ID NO: 6652 - protein, 7 aa, synthetic construct
RSDEVSD

SEQ ID NO: 6653 - protein, 7 aa, synthetic construct
VFHQGHV

SEQ ID NO: 6654 - protein, 7 aa, synthetic construct
PDVRISV

SEQ ID NO: 6655 - protein, 7 aa, synthetic construct
GVNQNMR

SEQ ID NO: 6656 - protein, 7 aa, synthetic construct
DFQQGHV

SEQ ID NO: 6657 - protein, 7 aa, synthetic construct
KIRGTEM

SEQ ID NO: 6658 - protein, 7 aa, synthetic construct
TINQLIM

SEQ ID NO: 6659 - protein, 7 aa, synthetic construct
ANIECAV

SEQ ID NO: 6660 - protein, 7 aa, synthetic construct
AMGLSEG

SEQ ID NO: 6661 - protein, 7 aa, synthetic construct
GYGDNHH

SEQ ID NO: 6662 - protein, 7 aa, synthetic construct
ARNLNEG

SEQ ID NO: 6663 - protein, 7 aa, synthetic construct
GIMRTQK

SEQ ID NO: 6664 - protein, 6 aa, synthetic construct
IGKEAC

SEQ ID NO: 6665 - protein, 7 aa, synthetic construct
IGRIVKE

SEQ ID NO: 6666 - protein, 7 aa, synthetic construct
VTIGNGL

SEQ ID NO: 6667 - protein, 7 aa, synthetic construct
MNGVSPH

SEQ ID NO: 6668 - protein, 7 aa, synthetic construct
KINTFKV

SEQ ID NO: 6669 - protein, 7 aa, synthetic construct
QVKSSET

SEQ ID NO: 6670 - protein, 7 aa, synthetic construct
QLSSTST

SEQ ID NO: 6671 - protein, 7 aa, synthetic construct
TISTSSS

SEQ ID NO: 6672 - protein, 7 aa, synthetic construct
GMRLSEG

SEQ ID NO: 6673 - protein, 7 aa, synthetic construct
VKLYGAL

SEQ ID NO: 6674 - protein, 7 aa, synthetic construct
NGQRVSF

SEQ ID NO: 6675 - protein, 7 aa, synthetic construct
VAREEQK

SEQ ID NO: 6676 - protein, 7 aa, synthetic construct
LVDHNSV

SEQ ID NO: 6677 - protein, 7 aa, synthetic construct
VPREEHM

SEQ ID NO: 6678 - protein, 7 aa, synthetic construct
NRQGVSF

SEQ ID NO: 6679 - protein, 7 aa, synthetic construct
IGRILNE

SEQ ID NO: 6680 - protein, 7 aa, synthetic construct
VFQQGHL

SEQ ID NO: 6681 - protein, 7 aa, synthetic construct
RDRGNSD

SEQ ID NO: 6682 - protein, 7 aa, synthetic construct
EVENPGK

SEQ ID NO: 6683 - protein, 7 aa, synthetic construct
ASNGIKL

SEQ ID NO: 6684 - protein, 7 aa, synthetic construct
AATGNKL

SEQ ID NO: 6685 - protein, 7 aa, synthetic construct
MHHASKE

SEQ ID NO: 6686 - protein, 7 aa, synthetic construct
NSSVVKT

SEQ ID NO: 6687 - protein, 7 aa, synthetic construct
QKKPIER

SEQ ID NO: 6688 - protein, 7 aa, synthetic construct
GSMQTHN

SEQ ID NO: 6689 - protein, 7 aa, synthetic construct
NVVSSAL

SEQ ID NO: 6690 - protein, 7 aa, synthetic construct
PYESPTS

SEQ ID NO: 6691 - protein, 7 aa, synthetic construct
NRNTSQK

SEQ ID NO: 6692 - protein, 7 aa, synthetic construct
GRKLATP

SEQ ID NO: 6693 - protein, 7 aa, synthetic construct
RYGDNQH

SEQ ID NO: 6694 - protein, 7 aa, synthetic construct
GSMQAQN

SEQ ID NO: 6695 - protein, 7 aa, synthetic construct
GYVVKSS

SEQ ID NO: 6696 - protein, 7 aa, synthetic construct
SLGNIKS

SEQ ID NO: 6697 - protein, 7 aa, synthetic construct
QTKGGSS

SEQ ID NO: 6698 - protein, 7 aa, synthetic construct
TIERTAK

SEQ ID NO: 6699 - protein, 7 aa, synthetic construct
LKIYGAL

SEQ ID NO: 6700 - protein, 7 aa, synthetic construct
IGQGESV

SEQ ID NO: 6701 - protein, 7 aa, synthetic construct
GYGDKQH

SEQ ID NO: 6702 - protein, 7 aa, synthetic construct
HVVALGV

SEQ ID NO: 6703 - protein, 7 aa, synthetic construct
TIRQLNM

SEQ ID NO: 6704 - protein, 7 aa, synthetic construct
GTLTNKA

SEQ ID NO: 6705 - protein, 7 aa, synthetic construct
TISHVTT

SEQ ID NO: 6706 - protein, 7 aa, synthetic construct
IGQGVSF

SEQ ID NO: 6707 - protein, 7 aa, synthetic construct
PKNLHSS

SEQ ID NO: 6708 - protein, 7 aa, synthetic construct
DRNVTEG

SEQ ID NO: 6709 - protein, 7 aa, synthetic construct
SDAASKV

SEQ ID NO: 6710 - protein, 7 aa, synthetic construct
VFQQGHD

SEQ ID NO: 6711 - protein, 7 aa, synthetic construct
ALSVGQK

SEQ ID NO: 6712 - protein, 7 aa, synthetic construct
VFQKGHV

SEQ ID NO: 6713 - protein, 7 aa, synthetic construct
DKNAATG

SEQ ID NO: 6714 - protein, 7 aa, synthetic construct
NGQGLSF

SEQ ID NO: 6715 - protein, 7 aa, synthetic construct
LDTQHLI

SEQ ID NO: 6716 - protein, 7 aa, synthetic construct
VTIGNGF

SEQ ID NO: 6717 - protein, 7 aa, synthetic construct
IGSMGGL

SEQ ID NO: 6718 - protein, 7 aa, synthetic construct
FQGAESR

SEQ ID NO: 6719 - protein, 7 aa, synthetic construct
AKRHSEG

SEQ ID NO: 6720 - protein, 7 aa, synthetic construct
VGSVRKD

SEQ ID NO: 6721 - protein, 7 aa, synthetic construct
AMSLREG

SEQ ID NO: 6722 - protein, 7 aa, synthetic construct
IGVGTNS

SEQ ID NO: 6723 - protein, 7 aa, synthetic construct
VALEEHM

SEQ ID NO: 6724 - protein, 7 aa, synthetic construct
GRHNEPP

SEQ ID NO: 6725 - protein, 7 aa, synthetic construct
ITIGNGF

SEQ ID NO: 6726 - protein, 7 aa, synthetic construct
MEHRNDG

SEQ ID NO: 6727 - protein, 7 aa, synthetic construct
GMQDVLI

SEQ ID NO: 6728 - protein, 7 aa, synthetic construct
HVENPGK

SEQ ID NO: 6729 - protein, 7 aa, synthetic construct
QTTGGYS

SEQ ID NO: 6730 - protein, 7 aa, synthetic construct
DHAPGTH

SEQ ID NO: 6731 - protein, 7 aa, synthetic construct
NSYVVKS

SEQ ID NO: 6732 - protein, 7 aa, synthetic construct
GTMQTQN

SEQ ID NO: 6733 - protein, 7 aa, synthetic construct
GLRGEDM

SEQ ID NO: 6734 - protein, 7 aa, synthetic construct
IGDMGGL

SEQ ID NO: 6735 - protein, 7 aa, synthetic construct
PTRGENG

SEQ ID NO: 6736 - protein, 7 aa, synthetic construct
DVNSDTQ

SEQ ID NO: 6737 - protein, 7 aa, synthetic construct
DVKSDTH

SEQ ID NO: 6738 - protein, 7 aa, synthetic construct
AMRLCEG

SEQ ID NO: 6739 - protein, 7 aa, synthetic construct
PTRGENI

SEQ ID NO: 6740 - protein, 7 aa, synthetic construct
TVSHVIN

SEQ ID NO: 6741 - protein, 7 aa, synthetic construct
GIMSTQN

SEQ ID NO: 6742 - protein, 7 aa, synthetic construct
TIRQVNI

SEQ ID NO: 6743 - protein, 7 aa, synthetic construct
SLLPGYH

SEQ ID NO: 6744 - protein, 7 aa, synthetic construct
QVGSATV

SEQ ID NO: 6745 - protein, 7 aa, synthetic construct
IGVGTKT

SEQ ID NO: 6746 - protein, 7 aa, synthetic construct
VAPEEHM

SEQ ID NO: 6747 - protein, 7 aa, synthetic construct
DYPSRGI

SEQ ID NO: 6748 - protein, 7 aa, synthetic construct
NQGAESR

SEQ ID NO: 6749 - protein, 7 aa, synthetic construct
GINLATP

SEQ ID NO: 6750 - protein, 7 aa, synthetic construct
VVLPIAS

SEQ ID NO: 6751 - protein, 7 aa, synthetic construct
EIYNTAL

SEQ ID NO: 6752 - protein, 7 aa, synthetic construct
EIYNTVH

SEQ ID NO: 6753 - protein, 7 aa, synthetic construct
PYNHTTS

SEQ ID NO: 6754 - protein, 7 aa, synthetic construct
VNDSAAN

SEQ ID NO: 6755 - protein, 7 aa, synthetic construct
ARNVTEA

SEQ ID NO: 6756 - protein, 7 aa, synthetic construct
REKSEGL

SEQ ID NO: 6757 - protein, 7 aa, synthetic construct
SLGNIQT

SEQ ID NO: 6758 - protein, 7 aa, synthetic construct
KGAMGGL

SEQ ID NO: 6759 - protein, 7 aa, synthetic construct
VLRPNIV

SEQ ID NO: 6760 - protein, 7 aa, synthetic construct
HTTGGSS

SEQ ID NO: 6761 - protein, 7 aa, synthetic construct
QKTGGSS

SEQ ID NO: 6762 - protein, 7 aa, synthetic construct
RNAPNID

SEQ ID NO: 6763 - protein, 7 aa, synthetic construct
GGLPIDS

SEQ ID NO: 6764 - protein, 7 aa, synthetic construct
AASGIKL

SEQ ID NO: 6765 - protein, 7 aa, synthetic construct
NRTTSEK

SEQ ID NO: 6766 - protein, 7 aa, synthetic construct
HVVAVGE

SEQ ID NO: 6767 - protein, 7 aa, synthetic construct
KREHDGY

SEQ ID NO: 6768 - protein, 7 aa, synthetic construct
KAIEGIV

SEQ ID NO: 6769 - protein, 7 aa, synthetic construct
GYEENQQ

SEQ ID NO: 6770 - protein, 7 aa, synthetic construct
SGRNKSV

SEQ ID NO: 6771 - protein, 7 aa, synthetic construct
ARNVKEG

SEQ ID NO: 6772 - protein, 7 aa, synthetic construct
HKPETAL

SEQ ID NO: 6773 - protein, 7 aa, synthetic construct
NSSDVKS

SEQ ID NO: 6774 - protein, 7 aa, synthetic construct
RSLNNAT

SEQ ID NO: 6775 - protein, 7 aa, synthetic construct
REKNEGL

SEQ ID NO: 6776 - protein, 7 aa, synthetic construct
RTRGENE

SEQ ID NO: 6777 - protein, 7 aa, synthetic construct
GTLHNKA

SEQ ID NO: 6778 - protein, 7 aa, synthetic construct
ETDTKSI

SEQ ID NO: 6779 - protein, 7 aa, synthetic construct
KLEFNRV

SEQ ID NO: 6780 - protein, 7 aa, synthetic construct
LGSVRMD

SEQ ID NO: 6781 - protein, 7 aa, synthetic construct
VAREEHL

SEQ ID NO: 6782 - protein, 7 aa, synthetic construct
VKIYCAL

SEQ ID NO: 6783 - protein, 7 aa, synthetic construct
KAIDGIE

SEQ ID NO: 6784 - protein, 7 aa, synthetic construct
PTRGKNE

SEQ ID NO: 6785 - protein, 7 aa, synthetic construct
SSQKTRL

SEQ ID NO: 6786 - protein, 7 aa, synthetic construct
GKAIVEN

SEQ ID NO: 6787 - protein, 7 aa, synthetic construct
TISNVTN

SEQ ID NO: 6788 - protein, 7 aa, synthetic construct
VFKQGHV

SEQ ID NO: 6789 - protein, 7 aa, synthetic construct
AMRLRER

SEQ ID NO: 6790 - protein, 7 aa, synthetic construct
DNMTKHL

SEQ ID NO: 6791 - protein, 7 aa, synthetic construct
ASMQTQN

SEQ ID NO: 6792 - protein, 7 aa, synthetic construct
PNLQQSH

SEQ ID NO: 6793 - protein, 7 aa, synthetic construct
PNLQHSQ

SEQ ID NO: 6794 - protein, 7 aa, synthetic construct
VLRPNIA

SEQ ID NO: 6795 - protein, 7 aa, synthetic construct
GTIGNGI

SEQ ID NO: 6796 - protein, 7 aa, synthetic construct
IGAMGGM

SEQ ID NO: 6797 - protein, 7 aa, synthetic construct
TKYNESL

SEQ ID NO: 6798 - protein, 7 aa, synthetic construct
NSTVVKS

SEQ ID NO: 6799 - protein, 7 aa, synthetic construct
MLKTETG

SEQ ID NO: 6800 - protein, 7 aa, synthetic construct
MIKRATT

SEQ ID NO: 6801 - protein, 7 aa, synthetic construct
SGVSDGR

SEQ ID NO: 6802 - protein, 7 aa, synthetic construct
REKTERL

SEQ ID NO: 6803 - protein, 7 aa, synthetic construct
IGKGVSV

SEQ ID NO: 6804 - protein, 7 aa, synthetic construct
GEVNADR

SEQ ID NO: 6805 - protein, 7 aa, synthetic construct
ENMTKHV

SEQ ID NO: 6806 - protein, 6 aa, synthetic construct
PTRGEN

SEQ ID NO: 6807 - protein, 7 aa, synthetic construct
PYDSHTS

SEQ ID NO: 6808 - protein, 7 aa, synthetic construct
PFDSPST

SEQ ID NO: 6809 - protein, 7 aa, synthetic construct
DKSAATG

SEQ ID NO: 6810 - protein, 7 aa, synthetic construct
GRHNENP

SEQ ID NO: 6811 - protein, 7 aa, synthetic construct
VEIYGAL

SEQ ID NO: 6812 - protein, 7 aa, synthetic construct
RENTEGL

SEQ ID NO: 6813 - protein, 7 aa, synthetic construct
GGLTIAS

SEQ ID NO: 6814 - protein, 7 aa, synthetic construct
LDMSQRG

SEQ ID NO: 6815 - protein, 7 aa, synthetic construct
VREPGTH

SEQ ID NO: 6816 - protein, 7 aa, synthetic construct
MKRGGEQ

SEQ ID NO: 6817 - protein, 7 aa, synthetic construct
IMNGIVL

SEQ ID NO: 6818 - protein, 7 aa, synthetic construct
PTRGEYE

SEQ ID NO: 6819 - protein, 7 aa, synthetic construct
PGQSGKV

SEQ ID NO: 6820 - protein, 7 aa, synthetic construct
GVVMLIG

SEQ ID NO: 6821 - protein, 7 aa, synthetic construct
MMEKMML

SEQ ID NO: 6822 - protein, 7 aa, synthetic construct
ATRGENE

SEQ ID NO: 6823 - protein, 6 aa, synthetic construct
PKSETV

SEQ ID NO: 6824 - protein, 7 aa, synthetic construct
TSPNNSV

SEQ ID NO: 6825 - protein, 7 aa, synthetic construct
QTSSDTM

SEQ ID NO: 6826 - protein, 7 aa, synthetic construct
MTIGNGY

SEQ ID NO: 6827 - protein, 7 aa, synthetic construct
DAREEHI

SEQ ID NO: 6828 - protein, 7 aa, synthetic construct
QIRGTGM

SEQ ID NO: 6829 - protein, 7 aa, synthetic construct
TIRQVKM

SEQ ID NO: 6830 - protein, 7 aa, synthetic construct
RNAHNMD

SEQ ID NO: 6831 - protein, 7 aa, synthetic construct
GRNNETP

SEQ ID NO: 6832 - protein, 7 aa, synthetic construct
RLSGLEV

SEQ ID NO: 6833 - protein, 7 aa, synthetic construct
MMKTQTG

SEQ ID NO: 6834 - protein, 7 aa, synthetic construct
YQGAESS

SEQ ID NO: 6835 - protein, 7 aa, synthetic construct
PKSETVF

SEQ ID NO: 6836 - protein, 7 aa, synthetic construct
RYENNQH

SEQ ID NO: 6837 - protein, 7 aa, synthetic construct
HTSSETR

SEQ ID NO: 6838 - protein, 7 aa, synthetic construct
PTGGENE

SEQ ID NO: 6839 - protein, 6 aa, synthetic construct
YQGAER

SEQ ID NO: 6840 - protein, 7 aa, synthetic construct
TINQVII

SEQ ID NO: 6841 - protein, 7 aa, synthetic construct
VIIYGAL

SEQ ID NO: 6842 - protein, 7 aa, synthetic construct
SGLSGKV

SEQ ID NO: 6843 - protein, 7 aa, synthetic construct
GTGLAVK

SEQ ID NO: 6844 - protein, 7 aa, synthetic construct
ASTGNKL

SEQ ID NO: 6845 - protein, 7 aa, synthetic construct
ADVRNSV

SEQ ID NO: 6846 - protein, 7 aa, synthetic construct
AKRLSEV

SEQ ID NO: 6847 - protein, 7 aa, synthetic construct
DNITKHV

SEQ ID NO: 6848 - protein, 7 aa, synthetic construct
RTSNSEV

SEQ ID NO: 6849 - protein, 7 aa, synthetic construct
QTTGGAV

SEQ ID NO: 6850 - protein, 7 aa, synthetic construct
PTRGDNM

SEQ ID NO: 6851 - protein, 7 aa, synthetic construct
ERSGLGI

SEQ ID NO: 6852 - protein, 7 aa, synthetic construct
QTTSETR

SEQ ID NO: 6853 - protein, 7 aa, synthetic construct
DNMTNHV

SEQ ID NO: 6854 - protein, 7 aa, synthetic construct
AMRLREA

SEQ ID NO: 6855 - protein, 7 aa, synthetic construct
QTTGDTV

SEQ ID NO: 6856 - protein, 7 aa, synthetic construct
QIRGAEM

SEQ ID NO: 6857 - protein, 7 aa, synthetic construct
GYGNNQH

SEQ ID NO: 6858 - protein, 7 aa, synthetic construct
RDKTEGL

SEQ ID NO: 6859 - protein, 7 aa, synthetic construct
PKLQQSQ

SEQ ID NO: 6860 - protein, 7 aa, synthetic construct
GTCMAVK

SEQ ID NO: 6861 - protein, 7 aa, synthetic construct
SNQNNSQ

SEQ ID NO: 6862 - protein, 7 aa, synthetic construct
PKSESVL

SEQ ID NO: 6863 - protein, 7 aa, synthetic construct
PKSDTVL

SEQ ID NO: 6864 - protein, 7 aa, synthetic construct
VAREELM

SEQ ID NO: 6865 - protein, 7 aa, synthetic construct
GRHNESP

SEQ ID NO: 6866 - protein, 7 aa, synthetic construct
IAAMGGL

SEQ ID NO: 6867 - protein, 7 aa, synthetic construct
AMSLSDG

SEQ ID NO: 6868 - protein, 7 aa, synthetic construct
GRHNEIT

SEQ ID NO: 6869 - protein, 7 aa, synthetic construct
ASLTQTH

SEQ ID NO: 6870 - protein, 7 aa, synthetic construct
GNKLATP

SEQ ID NO: 6871 - protein, 7 aa, synthetic construct
PKSETVM

SEQ ID NO: 6872 - protein, 7 aa, synthetic construct
PYNHHTS

SEQ ID NO: 6873 - protein, 7 aa, synthetic construct
GLTGYSR

SEQ ID NO: 6874 - protein, 7 aa, synthetic construct
VKNYGAL

SEQ ID NO: 6875 - protein, 7 aa, synthetic construct
VSREEHM

SEQ ID NO: 6876 - protein, 7 aa, synthetic construct
VKIYGAP

SEQ ID NO: 6877 - protein, 7 aa, synthetic construct
DARDEHM

SEQ ID NO: 6878 - protein, 7 aa, synthetic construct
HTRGENM

SEQ ID NO: 6879 - protein, 7 aa, synthetic construct
VKIYVAL

SEQ ID NO: 6880 - protein, 7 aa, synthetic construct
VFQQAHV

SEQ ID NO: 6881 - protein, 7 aa, synthetic construct
HEVAVGV

SEQ ID NO: 6882 - protein, 7 aa, synthetic construct
VKIYGAR

SEQ ID NO: 6883 - protein, 7 aa, synthetic construct
NRNTRDI

SEQ ID NO: 6884 - protein, 7 aa, synthetic construct
KDTQHLN

SEQ ID NO: 6885 - protein, 7 aa, synthetic construct
DNMSKHV

SEQ ID NO: 6886 - protein, 7 aa, synthetic construct
GIKRTQN

SEQ ID NO: 6887 - protein, 7 aa, synthetic construct
GMQDERI

SEQ ID NO: 6888 - protein, 7 aa, synthetic construct
QTTGGSI

SEQ ID NO: 6889 - protein, 7 aa, synthetic construct
GKQDVRI

SEQ ID NO: 6890 - protein, 7 aa, synthetic construct
GYQDNQH

SEQ ID NO: 6891 - protein, 7 aa, synthetic construct
PNPETAL

SEQ ID NO: 6892 - protein, 7 aa, synthetic construct
GSMQTQT

SEQ ID NO: 6893 - protein, 7 aa, synthetic construct
RQVHSKD

SEQ ID NO: 6894 - protein, 7 aa, synthetic construct
GYIQTQN

SEQ ID NO: 6895 - protein, 7 aa, synthetic construct
GSKLAAP

SEQ ID NO: 6896 - protein, 7 aa, synthetic construct
PNNHHSS

SEQ ID NO: 6897 - protein, 7 aa, synthetic construct
VSATKSN

SEQ ID NO: 6898 - protein, 7 aa, synthetic construct
NRNTGEK

SEQ ID NO: 6899 - protein, 7 aa, synthetic construct
PTRGEKL

SEQ ID NO: 6900 - protein, 7 aa, synthetic construct
QPSSDTR

SEQ ID NO: 6901 - protein, 7 aa, synthetic construct
ATTGIKL

SEQ ID NO: 6902 - protein, 7 aa, synthetic construct
YGQGVSF

SEQ ID NO: 6903 - protein, 7 aa, synthetic construct
MKIGNGF

SEQ ID NO: 6904 - protein, 7 aa, synthetic construct
VVHVNVA

SEQ ID NO: 6905 - protein, 7 aa, synthetic construct
SGFAVHS

SEQ ID NO: 6906 - protein, 7 aa, synthetic construct
MMKTETW

SEQ ID NO: 6907 - protein, 7 aa, synthetic construct
WHLTENW

SEQ ID NO: 6908 - protein, 7 aa, synthetic construct
NSSVDKS

SEQ ID NO: 6909 - protein, 6 aa, synthetic construct
AGSEAI

SEQ ID NO: 6910 - protein, 7 aa, synthetic construct
REKTEGQ

SEQ ID NO: 6911 - protein, 6 aa, synthetic construct
GENNQH

SEQ ID NO: 6912 - protein, 7 aa, synthetic construct
TSSPPLG

SEQ ID NO: 6913 - protein, 7 aa, synthetic construct
AMRVREG

SEQ ID NO: 6914 - protein, 7 aa, synthetic construct
PKPETDL

SEQ ID NO: 6915 - protein, 7 aa, synthetic construct
VSDSTNR

SEQ ID NO: 6916 - protein, 7 aa, synthetic construct
SLGNNQS

SEQ ID NO: 6917 - protein, 7 aa, synthetic construct
TISQVNM

SEQ ID NO: 6918 - protein, 7 aa, synthetic construct
SGRNNSE

SEQ ID NO: 6919 - protein, 7 aa, synthetic construct
SMNGITN

SEQ ID NO: 6920 - protein, 7 aa, synthetic construct
GYGLSGN

SEQ ID NO: 6921 - protein, 7 aa, synthetic construct
PTRGDNL

SEQ ID NO: 6922 - protein, 7 aa, synthetic construct
IGRIVND

SEQ ID NO: 6923 - protein, 7 aa, synthetic construct
QTTGGTV

SEQ ID NO: 6924 - protein, 7 aa, synthetic construct
SIRQVNM

SEQ ID NO: 6925 - protein, 7 aa, synthetic construct
MTIGNGI

SEQ ID NO: 6926 - protein, 7 aa, synthetic construct
GSKMATP

SEQ ID NO: 6927 - protein, 7 aa, synthetic construct
RLVQNAD

SEQ ID NO: 6928 - protein, 7 aa, synthetic construct
VKVYGAM

SEQ ID NO: 6929 - protein, 7 aa, synthetic construct
GVVNADG

SEQ ID NO: 6930 - protein, 7 aa, synthetic construct
PGKEQLL

SEQ ID NO: 6931 - protein, 7 aa, synthetic construct
TGFAVHS

SEQ ID NO: 6932 - protein, 7 aa, synthetic construct
GSLTQTN

SEQ ID NO: 6933 - protein, 7 aa, synthetic construct
QTTGASS

SEQ ID NO: 6934 - protein, 7 aa, synthetic construct
ADGLLKM

SEQ ID NO: 6935 - protein, 7 aa, synthetic construct
NRNTSER

SEQ ID NO: 6936 - protein, 7 aa, synthetic construct
PKPDTAL

SEQ ID NO: 6937 - protein, 7 aa, synthetic construct
ALIVGQK

SEQ ID NO: 6938 - protein, 7 aa, synthetic construct
LEKNGLI

SEQ ID NO: 6939 - protein, 7 aa, synthetic construct
LVRNGRE

SEQ ID NO: 6940 - protein, 7 aa, synthetic construct
PKRGENM

SEQ ID NO: 6941 - protein, 7 aa, synthetic construct
GYGLKSS

SEQ ID NO: 6942 - protein, 7 aa, synthetic construct
DNMTKQV

SEQ ID NO: 6943 - protein, 7 aa, synthetic construct
AMLLSEG

SEQ ID NO: 6944 - protein, 7 aa, synthetic construct
HYNHPTS

SEQ ID NO: 6945 - protein, 7 aa, synthetic construct
VKIYSAL

SEQ ID NO: 6946 - protein, 7 aa, synthetic construct
SLLQNAD

SEQ ID NO: 6947 - protein, 7 aa, synthetic construct
QIKPNER

SEQ ID NO: 6948 - protein, 7 aa, synthetic construct
VSQAQAQ

SEQ ID NO: 6949 - protein, 7 aa, synthetic construct
GYENKQH

SEQ ID NO: 6950 - protein, 7 aa, synthetic construct
QTTGGST

SEQ ID NO: 6951 - protein, 7 aa, synthetic construct
GYENNHH

SEQ ID NO: 6952 - protein, 7 aa, synthetic construct
RNAPNKD

SEQ ID NO: 6953 - protein, 7 aa, synthetic construct
GTGMSVK

SEQ ID NO: 6954 - protein, 7 aa, synthetic construct
NRYTSEK

SEQ ID NO: 6955 - protein, 7 aa, synthetic construct
VARGAYA

SEQ ID NO: 6956 - protein, 7 aa, synthetic construct
VLVRSIC

SEQ ID NO: 6957 - protein, 7 aa, synthetic construct
NVEFNRV

SEQ ID NO: 6958 - protein, 7 aa, synthetic construct
EGSVRMD

SEQ ID NO: 6959 - protein, 7 aa, synthetic construct
PKHETAL

SEQ ID NO: 6960 - protein, 6 aa, synthetic construct
GGLPIA

SEQ ID NO: 6961 - protein, 7 aa, synthetic construct
PGSETTT

SEQ ID NO: 6962 - protein, 7 aa, synthetic construct
RNAPKMD

SEQ ID NO: 6963 - protein, 7 aa, synthetic construct
ATRLSEG

SEQ ID NO: 6964 - protein, 7 aa, synthetic construct
IINGMVL

SEQ ID NO: 6965 - protein, 7 aa, synthetic construct
IGRNVNE

SEQ ID NO: 6966 - protein, 7 aa, synthetic construct
HVVDVGV

SEQ ID NO: 6967 - protein, 7 aa, synthetic construct
SGQSGKL

SEQ ID NO: 6968 - protein, 7 aa, synthetic construct
PNSETVL

SEQ ID NO: 6969 - protein, 7 aa, synthetic construct
HVVAEGV

SEQ ID NO: 6970 - protein, 7 aa, synthetic construct
VIDSSNR

SEQ ID NO: 6971 - protein, 7 aa, synthetic construct
VKDYGAL

SEQ ID NO: 6972 - protein, 7 aa, synthetic construct
HVEAVGV

SEQ ID NO: 6973 - protein, 7 aa, synthetic construct
PYDSPKS

SEQ ID NO: 6974 - protein, 7 aa, synthetic construct
PTRGESL

SEQ ID NO: 6975 - protein, 7 aa, synthetic construct
PNNLHST

SEQ ID NO: 6976 - protein, 7 aa, synthetic construct
VMQDVRI

SEQ ID NO: 6977 - protein, 7 aa, synthetic construct
VKIYGEL

SEQ ID NO: 6978 - protein, 7 aa, synthetic construct
NAQGVSF

SEQ ID NO: 6979 - protein, 7 aa, synthetic construct
TSSQPVV

SEQ ID NO: 6980 - protein, 7 aa, synthetic construct
AMRRREG

SEQ ID NO: 6981 - protein, 6 aa, synthetic construct
PTRGNE

SEQ ID NO: 6982 - protein, 7 aa, synthetic construct
TSSPPRG

SEQ ID NO: 6983 - protein, 7 aa, synthetic construct
ATRLREV

SEQ ID NO: 6984 - protein, 7 aa, synthetic construct
TISHVIN

SEQ ID NO: 6985 - protein, 7 aa, synthetic construct
VSLTQTH

SEQ ID NO: 6986 - protein, 7 aa, synthetic construct
GSKLANP

SEQ ID NO: 6987 - protein, 7 aa, synthetic construct
GYEKNQH

SEQ ID NO: 6988 - protein, 7 aa, synthetic construct
VKIYGTL

SEQ ID NO: 6989 - protein, 7 aa, synthetic construct
RGERNQE

SEQ ID NO: 6990 - protein, 7 aa, synthetic construct
PNRGENE

SEQ ID NO: 6991 - protein, 7 aa, synthetic construct
EMSLSEG

SEQ ID NO: 6992 - protein, 7 aa, synthetic construct
PRVNLGV

SEQ ID NO: 6993 - protein, 7 aa, synthetic construct
SGQSGNV

SEQ ID NO: 6994 - protein, 7 aa, synthetic construct
RTGNSEI

SEQ ID NO: 6995 - protein, 7 aa, synthetic construct
PVLSGKV

SEQ ID NO: 6996 - protein, 7 aa, synthetic construct
QTTGGPV

SEQ ID NO: 6997 - protein, 7 aa, synthetic construct
GSMQTQI

SEQ ID NO: 6998 - protein, 7 aa, synthetic construct
GSMQKQK

SEQ ID NO: 6999 - protein, 7 aa, synthetic construct
VKIYAAL

SEQ ID NO: 7000 - protein, 7 aa, synthetic construct
EDRTRDG

SEQ ID NO: 7001 - RNA, 21 nt, synthetic construct
  source 1..21: mol_type = other RNA
gtcaaaatatacggcgccctc

SEQ ID NO: 7002 - RNA, 21 nt, synthetic construct
  source 1..21: mol_type = other RNA
cctacgcggggtgagaatgag

SEQ ID NO: 7003 - RNA, 21 nt, synthetic construct
  source 1..21: mol_type = other RNA
gacgtggagaaccccggcaag

SEQ ID NO: 7004 - RNA, 21 nt, synthetic construct
  source 1..21: mol_type = other RNA
gcggctactgggattaagttg

SEQ ID NO: 7005 - RNA, 21 nt, synthetic construct
  source 1..21: mol_type = other RNA
atcgggcaaggagtgagcgtg

SEQ ID NO: 7006 - RNA, 21 nt, synthetic construct
  source 1..21: mol_type = other RNA
gtgaacgccagcgccgccaac

SEQ ID NO: 7007 - RNA, 21 nt, synthetic construct
  source 1..21: mol_type = other RNA
cgtactagtaatagtgatgtt

SEQ ID NO: 7008 - RNA, 21 nt, synthetic construct
  source 1..21: mol_type = other RNA
tctctgggtaacatccaatcg

SEQ ID NO: 7009 - RNA, 21 nt, synthetic construct
  source 1..21: mol_type = other RNA
aacagaaacaccagcgagaag

SEQ ID NO: 7010 - RNA, 21 nt, synthetic construct
  source 1..21: mol_type = other RNA
cagacgtctagtgatactagg

SEQ ID NO: 7011 - RNA, 21 nt, synthetic construct
  source 1..21: mol_type = other RNA
gtgaaagtctacggcgctctg

SEQ ID NO: 7012 - RNA, 21 nt, synthetic construct
  source 1..21: mol_type = other RNA
cagatcagaggcaccgagatg

SEQ ID NO: 7013 - RNA, 21 nt, synthetic construct
  source 1..21: mol_type = other RNA
gttgctcgtgaggagcatatg

SEQ ID NO: 7014 - RNA, 21 nt, synthetic construct
  source 1..21: mol_type = other RNA
gggacgttgcctaataaggct

SEQ ID NO: 7015 - RNA, 21 nt, synthetic construct
  source 1..21: mol_type = other RNA
gcgatgcgtcttagtgagggg

SEQ ID NO: 7016 - RNA, 21 nt, synthetic construct
  source 1..21: mol_type = other RNA
gacgtgaagagcgacacccag

SEQ ID NO: 7017 - RNA, 21 nt, synthetic construct
  source 1..21: mol_type = other RNA
ggcaccggcatggccgtgaag

SEQ ID NO: 7018 - RNA, 21 nt, synthetic construct
  source 1..21: mol_type = other RNA
accagcagcccccccgtggtg

SEQ ID NO: 7019 - RNA, 21 nt, synthetic construct
  source 1..21: mol_type = other RNA
aatggtcagggtgtttctttt

SEQ ID NO: 7020 - RNA, 21 nt, synthetic construct
  source 1..21: mol_type = other RNA
ggcagacacaacgagaccccc

SEQ ID NO: 7021 - RNA, 21 nt, synthetic construct
  source 1..21: mol_type = other RNA
ggctccatgcaaacacaaaac

SEQ ID NO: 7022 - RNA, 21 nt, synthetic construct
  source 1..21: mol_type = other RNA
ggcatgcaagacgtacgcatc

SEQ ID NO: 7023 - RNA, 21 nt, synthetic construct
  source 1..21: mol_type = other RNA
atgatgaagactgagacgggg

SEQ ID NO: 7024 - RNA, 21 nt, synthetic construct
  source 1..21: mol_type = other RNA
gccagcaccggcatcaagctg

SEQ ID NO: 7025 - RNA, 21 nt, synthetic construct
  source 1..21: mol_type = other RNA
gtcttccaacaaggacacgtt

SEQ ID NO: 7026 - RNA, 21 nt, synthetic construct
  source 1..21: mol_type = other RNA
caaacaacggggggatccagt

SEQ ID NO: 7027 - RNA, 21 nt, synthetic construct
  source 1..21: mol_type = other RNA
caaataaaaccgatcgaacgg

SEQ ID NO: 7028 - RNA, 21 nt, synthetic construct
  source 1..21: mol_type = other RNA
ataggggccatgggcggtctg

SEQ ID NO: 7029 - RNA, 21 nt, synthetic construct
  source 1..21: mol_type = other RNA
ggcagcaagctggccaccccc

SEQ ID NO: 7030 - RNA, 21 nt, synthetic construct
  source 1..21: mol_type = other RNA
cccggcctgagcggcaaggtg

SEQ ID NO: 7031 - RNA, 21 nt, synthetic construct
  source 1..21: mol_type = other RNA
ggggtggttaatgctgatcgg

SEQ ID NO: 7032 - RNA, 21 nt, synthetic construct
  source 1..21: mol_type = other RNA
ttgaaggttgccggactgacc

SEQ ID NO: 7033 - RNA, 21 nt, synthetic construct
  source 1..21: mol_type = other RNA
gcccggaacgttacagaaggg

SEQ ID NO: 7034 - RNA, 21 nt, synthetic construct
  source 1..21: mol_type = other RNA
gtgaacgtgcaggccgagaga

SEQ ID NO: 7035 - RNA, 21 nt, synthetic construct
  source 1..21: mol_type = other RNA
gggagtctgactcagactcat

SEQ ID NO: 7036 - RNA, 21 nt, synthetic construct
  source 1..21: mol_type = other RNA
gagagaagcggcctgggcatg

SEQ ID NO: 7037 - RNA, 21 nt, synthetic construct
  source 1..21: mol_type = other RNA
ggcataatgagaacccaaaac

SEQ ID NO: 7038 - RNA, 21 nt, synthetic construct
  source 1..21: mol_type = other RNA
ggtgtgtctggtagggatcag

SEQ ID NO: 7039 - RNA, 21 nt, synthetic construct
  source 1..21: mol_type = other RNA
aacagttccgttgtcaaatct

SEQ ID NO: 7040 - RNA, 21 nt, synthetic construct
  source 1..21: mol_type = other RNA
accatcagccacgtcaccaac

SEQ ID NO: 7041 - RNA, 21 nt, synthetic construct
  source 1..21: mol_type = other RNA
cacgtggtggccgtgggcgtg

SEQ ID NO: 7042 - RNA, 21 nt, synthetic construct
  source 1..21: mol_type = other RNA
atgattaatcgtgctactact

SEQ ID NO: 7043 - RNA, 21 nt, synthetic construct
  source 1..21: mol_type = other RNA
cccaagcccgagaccgccctg

SEQ ID NO: 7044 - RNA, 21 nt, synthetic construct
  source 1..21: mol_type = other RNA
gtgagcgacagcagcaacaga

SEQ ID NO: 7045 - RNA, 21 nt, synthetic construct
  source 1..21: mol_type = other RNA
ggcaccatcggcaacggcttc

SEQ ID NO: 7046 - RNA, 21 nt, synthetic construct
  source 1..21: mol_type = other RNA
accatcagccccagcagcagc

SEQ ID NO: 7047 - RNA, 21 nt, synthetic construct
  source 1..21: mol_type = other RNA
gagactgctacgaagagtatt

SEQ ID NO: 7048 - RNA, 21 nt, synthetic construct
  source 1..21: mol_type = other RNA
tatcagggggctgagtcgcgt

SEQ ID NO: 7049 - RNA, 21 nt, synthetic construct
  source 1..21: mol_type = other RNA
aaagccatcgacggcatcgtg

SEQ ID NO: 7050 - RNA, 21 nt, synthetic construct
  source 1..21: mol_type = other RNA
gcggatcggactagggatggg

SEQ ID NO: 7051 - RNA, 21 nt, synthetic construct
  source 1..21: mol_type = other RNA
agaagcgacgtggtgagcgac

SEQ ID NO: 7052 - RNA, 21 nt, synthetic construct
  source 1..21: mol_type = other RNA
agcggcagaaacaacagcgtg

SEQ ID NO: 7053 - RNA, 21 nt, synthetic construct
  source 1..21: mol_type = other RNA
ttggtcaaagacgtaagccaa

SEQ ID NO: 7054 - RNA, 21 nt, synthetic construct
  source 1..21: mol_type = other RNA
ccttatgatagtcctacgagt

SEQ ID NO: 7055 - RNA, 21 nt, synthetic construct
  source 1..21: mol_type = other RNA
ccgaataatcttcatagttct

SEQ ID NO: 7056 - RNA, 21 nt, synthetic construct
  source 1..21: mol_type = other RNA
attggggtgggtacgaagtcg

SEQ ID NO: 7057 - RNA, 21 nt, synthetic construct
  source 1..21: mol_type = other RNA
gttgacaaatccctcgttaga

SEQ ID NO: 7058 - RNA, 21 nt, synthetic construct
  source 1..21: mol_type = other RNA
atcggcagaatcgtgaacgag

SEQ ID NO: 7059 - DNA, 21 bp, synthetic construct
  source 1..21: mol_type = other DNA
aacagaaacaccagagagaag

SEQ ID NO: 7060 - DNA, 21 bp, synthetic construct
  source 1..21: mol_type = other DNA
cagacgtctagtgatactagt

SEQ ID NO: 7061 - DNA, 21 bp, synthetic construct
  source 1..21: mol_type = other DNA
gtgggcagcgtgagaatggac

SEQ ID NO: 7062 - DNA, 21 bp, synthetic construct
  source 1..21: mol_type = other DNA
gcgatgcgtcttagagagggg

SEQ ID NO: 7063 - DNA, 21 bp, synthetic construct
  source 1..21: mol_type = other DNA
gcgatgcgtcttagtgatggg

SEQ ID NO: 7064 - DNA, 21 bp, synthetic construct
  source 1..21: mol_type = other DNA
tgccaaggagccgaaagtcgc

SEQ ID NO: 7065 - RNA, 21 nt, synthetic construct
  source 1..21: mol_type = other RNA
ggcggactgcccatagcttca

SEQ ID NO: 7066 - RNA, 21 nt, synthetic construct
  source 1..21: mol_type = other RNA
cctacgcggggtgagaatatg

SEQ ID NO: 7067 - RNA, 21 nt, synthetic construct
  source 1..21: mol_type = other RNA
ccctacaaccaccccaccagc

SEQ ID NO: 7068 - DNA, 21 bp, synthetic construct
  source 1..21: mol_type = other DNA
gcgatgcgtcttagtgagcgg

SEQ ID NO: 7069 - RNA, 21 nt, synthetic construct
  source 1..21: mol_type = other RNA
cccaacctgcagcagagccag

SEQ ID NO: 7070 - RNA, 21 nt, synthetic construct
  source 1..21: mol_type = other RNA
agcgtgaccggcggccagctg

SEQ ID NO: 7071 - RNA, 21 nt, synthetic construct
  source 1..21: mol_type = other RNA
agagagaagactgaggggctg

SEQ ID NO: 7072 - RNA, 21 nt, synthetic construct
  source 1..21: mol_type = other RNA
aacagaaacaccagcgacatc

SEQ ID NO: 7073 - DNA, 21 bp, synthetic construct
  source 1..21: mol_type = other DNA
cagacgtctagtgaaactagg

SEQ ID NO: 7074 - RNA, 21 nt, synthetic construct
  source 1..21: mol_type = other RNA
gacgttaaatcagacacaaaa

SEQ ID NO: 7075 - RNA, 21 nt, synthetic construct
  source 1..21: mol_type = other RNA
atgacgatcggtaacggcttc

SEQ ID NO: 7076 - RNA, 21 nt, synthetic construct
  source 1..21: mol_type = other RNA
cctacgcggggtgagaatctg

SEQ ID NO: 7077 - DNA, 21 bp, synthetic construct
  source 1..21: mol_type = other DNA
cacacgtctagtgatactagg

SEQ ID NO: 7078 - DNA, 21 bp, synthetic construct
  source 1..21: mol_type = other DNA
gcgttgcgtcttagtgagggg

SEQ ID NO: 7079 - DNA, 21 bp, synthetic construct
  source 1..21: mol_type = other DNA
accagcagcccccccttggtg

SEQ ID NO: 7080 - DNA, 21 bp, synthetic construct
  source 1..21: mol_type = other DNA
cagacgtctagagatactagg

SEQ ID NO: 7081 - RNA, 21 nt, synthetic construct
  source 1..21: mol_type = other RNA
agaaacgcccccaacatggac

SEQ ID NO: 7082 - DNA, 21 bp, synthetic construct
  source 1..21: mol_type = other DNA
gttgctcgtgaggagcatatt

SEQ ID NO: 7083 - RNA, 21 nt, synthetic construct
  source 1..21: mol_type = other RNA
cgggatggtgttattttgatt

SEQ ID NO: 7084 - RNA, 21 nt, synthetic construct
  source 1..21: mol_type = other RNA
ggcagcaacctgaccaccccc

SEQ ID NO: 7085 - DNA, 21 bp, synthetic construct
  source 1..21: mol_type = other DNA
ggctccatccaaacacaaaac

SEQ ID NO: 7086 - DNA, 21 bp, synthetic construct
  source 1..21: mol_type = other DNA
cagacgtctagtgatactggg

SEQ ID NO: 7087 - RNA, 21 nt, synthetic construct
  source 1..21: mol_type = other RNA
accatcagacaggtgaacatg

SEQ ID NO: 7088 - RNA, 21 nt, synthetic construct
  source 1..21: mol_type = other RNA
agcctggtgcagaacgccgac

SEQ ID NO: 7089 - DNA, 21 bp, synthetic construct
  source 1..21: mol_type = other DNA
gatgctcgtgaggagcatatg

SEQ ID NO: 7090 - RNA, 21 nt, synthetic construct
  source 1..21: mol_type = other RNA
ataatgaacggcatggttctg

SEQ ID NO: 7091 - RNA, 21 nt, synthetic construct
  source 1..21: mol_type = other RNA
gtgttccagcaggtgcacgtg

SEQ ID NO: 7092 - RNA, 21 nt, synthetic construct
  source 1..21: mol_type = other RNA
ccagggagggaaaccactacc

SEQ ID NO: 7093 - DNA, 21 bp, synthetic construct
  source 1..21: mol_type = other DNA
gcgattcgtcttagtgagggg

SEQ ID NO: 7094 - DNA, 21 bp, synthetic construct
  source 1..21: mol_type = other DNA
gttgctcgtgatgagcatatg

SEQ ID NO: 7095 - RNA, 21 nt, synthetic construct
  source 1..21: mol_type = other RNA
cctaagtcggagactgtgttg

SEQ ID NO: 7096 - RNA, 21 nt, synthetic construct
  source 1..21: mol_type = other RNA
ggcaccaacagcgagatcgtg

SEQ ID NO: 7097 - RNA, 21 nt, synthetic construct
  source 1..21: mol_type = other RNA
caattgtccaacacgagcacc

SEQ ID NO: 7098 - RNA, 21 nt, synthetic construct
  source 1..21: mol_type = other RNA
cagacgtctagtgattctagg

SEQ ID NO: 7099 - RNA, 21 nt, synthetic construct
  source 1..21: mol_type = other RNA
caggtgaagagcaccgagacc

SEQ ID NO: 7100 - DNA, 21 bp, synthetic construct
  source 1..21: mol_type = other DNA
accagcagaccccccgtggtg

SEQ ID NO: 7101 - RNA, 21 nt, synthetic construct
  source 1..21: mol_type = other RNA
gttcatgcgccgggtacgcat

SEQ ID NO: 7102 - DNA, 21 bp, synthetic construct
  source 1..21: mol_type = other DNA
ggcaccggcatcgccgtgaag

SEQ ID NO: 7103 - RNA, 21 nt, synthetic construct
  source 1..21: mol_type = other RNA
cccagcagaggcgagaacgtg

SEQ ID NO: 7104 - DNA, 21 bp, synthetic construct
  source 1..21: mol_type = other DNA
aatggtcagggtgtttcttta

SEQ ID NO: 7105 - RNA, 21 nt, synthetic construct
  source 1..21: mol_type = other RNA
agacacgtgcacagcaaggac

SEQ ID NO: 7106 - RNA, 21 nt, synthetic construct
  source 1..21: mol_type = other RNA
agaacaggcaactctgacatc

SEQ ID NO: 7107 - DNA, 21 bp, synthetic construct
  source 1..21: mol_type = other DNA
accagcagcccccccgtgctg

SEQ ID NO: 7108 - DNA, 21 bp, synthetic construct
  source 1..21: mol_type = other DNA
gttgctcgtgaggatcatatg

SEQ ID NO: 7109 - RNA, 21 nt, synthetic construct
  source 1..21: mol_type = other RNA
gccacacggctcagcgaagta

SEQ ID NO: 7110 - DNA, 21 bp, synthetic construct
  source 1..21: mol_type = other DNA
gttgctcgtgaggagcaaatg

SEQ ID NO: 7111 - DNA, 21 bp, synthetic construct
  source 1..21: mol_type = other DNA
gtcttacaacaaggacacgtt

SEQ ID NO: 7112 - DNA, 21 bp, synthetic construct
  source 1..21: mol_type = other DNA
aacagaaaaaccagcgagaag

SEQ ID NO: 7113 - RNA, 21 nt, synthetic construct
  source 1..21: mol_type = other RNA
accagcaaaccaggtacctac

SEQ ID NO: 7114 - RNA, 21 nt, synthetic construct
  source 1..21: mol_type = other RNA
gataatatgactaagcatgtg

SEQ ID NO: 7115 - RNA, 21 nt, synthetic construct
  source 1..21: mol_type = other RNA
gggtatggggataatcagcat

SEQ ID NO: 7116 - RNA, 21 nt, synthetic construct
  source 1..21: mol_type = other RNA
aacagaaacaccagcgacaag

SEQ ID NO: 7117 - DNA, 21 bp, synthetic construct
  source 1..21: mol_type = other DNA
aatggtcatggtgtttctttt

SEQ ID NO: 7118 - DNA, 21 bp, synthetic construct
  source 1..21: mol_type = other DNA
atgatgaagactgagacgcgg

SEQ ID NO: 7119 - RNA, 21 nt, synthetic construct
  source 1..21: mol_type = other RNA
agcgagagcagacaggaggac

SEQ ID NO: 7120 - RNA, 21 nt, synthetic construct
  source 1..21: mol_type = other RNA
tctggtcagtcggggaaggtg

SEQ ID NO: 7121 - RNA, 21 nt, synthetic construct
  source 1..21: mol_type = other RNA
accggatacgcggaccactcc

SEQ ID NO: 7122 - RNA, 21 nt, synthetic construct
  source 1..21: mol_type = other RNA
gatatttcggcgaagcatgag

SEQ ID NO: 7123 - RNA, 21 nt, synthetic construct
  source 1..21: mol_type = other RNA
aacaagaacaccagcgacaac

SEQ ID NO: 7124 - DNA, 21 bp, synthetic construct
  source 1..21: mol_type = other DNA
gtgagagacagcagcaacaga

SEQ ID NO: 7125 - RNA, 21 nt, synthetic construct
  source 1..21: mol_type = other RNA
aacagaaacaccagcgagaac

SEQ ID NO: 7126 - DNA, 21 bp, synthetic construct
  source 1..21: mol_type = other DNA
atgatcaagactgagacgggg

SEQ ID NO: 7127 - RNA, 21 nt, synthetic construct
  source 1..21: mol_type = other RNA
gcgaagcgtcttagtgagggg

SEQ ID NO: 7128 - DNA, 21 bp, synthetic construct
  source 1..21: mol_type = other DNA
gtgagcgacagcagcaacagt

SEQ ID NO: 7129 - RNA, 21 nt, synthetic construct
  source 1..21: mol_type = other RNA
ggcaacaacctggccaccccc

SEQ ID NO: 7130 - RNA, 21 nt, synthetic construct
  source 1..21: mol_type = other RNA
agctcccaaaaaacaagcctg

SEQ ID NO: 7131 - DNA, 21 bp, synthetic construct
  source 1..21: mol_type = other DNA
atcatgaagactgagacgggg

SEQ ID NO: 7132 - DNA, 21 bp, synthetic construct
  source 1..21: mol_type = other DNA
atgaacagaggcggcgagcag

SEQ ID NO: 7133 - RNA, 21 nt, synthetic construct
  source 1..21: mol_type = other RNA
accggcttggcagtacactca

SEQ ID NO: 7134 - RNA, 21 nt, synthetic construct
  source 1..21: mol_type = other RNA
gcaggctcagaatcagcaata

SEQ ID NO: 7135 - RNA, 21 nt, synthetic construct
  source 1..21: mol_type = other RNA
atcagagaccagaccgccatc

SEQ ID NO: 7136 - RNA, 21 nt, synthetic construct
  source 1..21: mol_type = other RNA
cctacgcggggtgagaaagag

SEQ ID NO: 7137 - RNA, 21 nt, synthetic construct
  source 1..21: mol_type = other RNA
ggcacctacagcgagatggtg

SEQ ID NO: 7138 - RNA, 21 nt, synthetic construct
  source 1..21: mol_type = other RNA
agcgtgaacggcatcaccaac

SEQ ID NO: 7139 - RNA, 21 nt, synthetic construct
  source 1..21: mol_type = other RNA
tcaggcacccaagacaccaga

SEQ ID NO: 7140 - DNA, 21 bp, synthetic construct
  source 1..21: mol_type = other DNA
cagacgactagtgatactagg

SEQ ID NO: 7141 - DNA, 21 bp, synthetic construct
  source 1..21: mol_type = other DNA
gtgagcgaaagcagcaacaga

SEQ ID NO: 7142 - RNA, 21 nt, synthetic construct
  source 1..21: mol_type = other RNA
gttaaccacggaggcgaacca

SEQ ID NO: 7143 - DNA, 21 bp, synthetic construct
  source 1..21: mol_type = other DNA
accagcagccaccccgtggtg

SEQ ID NO: 7144 - RNA, 21 nt, synthetic construct
  source 1..21: mol_type = other RNA
gtgcagaagggcatcctgatc

SEQ ID NO: 7145 - RNA, 21 nt, synthetic construct
  source 1..21: mol_type = other RNA
tcctcggccatgggcggactg

SEQ ID NO: 7146 - DNA, 21 bp, synthetic construct
  source 1..21: mol_type = other DNA
taacagggggctgagtcgcgt

SEQ ID NO: 7147 - DNA, 21 bp, synthetic construct
  source 1..21: mol_type = other DNA
gttgctcgtgaggagcataag

SEQ ID NO: 7148 - DNA, 21 bp, synthetic construct
  source 1..21: mol_type = other DNA
aacagaaactccagcgagaag

SEQ ID NO: 7149 - RNA, 21 nt, synthetic construct
  source 1..21: mol_type = other RNA
tctggagtatctgaagcccgc

SEQ ID NO: 7150 - RNA, 21 nt, synthetic construct
  source 1..21: mol_type = other RNA
accaaccagcaagacatcatg

SEQ ID NO: 7151 - DNA, 21 bp, synthetic construct
  source 1..21: mol_type = other DNA
ggctccatgaaaacacaaaac

SEQ ID NO: 7152 - RNA, 21 nt, synthetic construct
  source 1..21: mol_type = other RNA
atcaaggagaccatgaagctg

SEQ ID NO: 7153 - RNA, 21 nt, synthetic construct
  source 1..21: mol_type = other RNA
ggctacgcccaccaggacgcc

SEQ ID NO: 7154 - DNA, 21 bp, synthetic construct
  source 1..21: mol_type = other DNA
gtgagcgacagcagaaacaga

SEQ ID NO: 7155 - RNA, 21 nt, synthetic construct
  source 1..21: mol_type = other RNA
agcatcggcggcatggtgaac

SEQ ID NO: 7156 - RNA, 21 nt, synthetic construct
  source 1..21: mol_type = other RNA
agcgtgaccggcggcagaagc

SEQ ID NO: 7157 - DNA, 21 bp, synthetic construct
  source 1..21: mol_type = other DNA
agaagcgaagtggtgagcgac

SEQ ID NO: 7158 - DNA, 21 bp, synthetic construct
  source 1..21: mol_type = other DNA
gcgatgcgtcatagtgagggg

SEQ ID NO: 7159 - DNA, 21 bp, synthetic construct
  source 1..21: mol_type = other DNA
ataggggccatcggcggtctg

SEQ ID NO: 7160 - DNA, 21 bp, synthetic construct
  source 1..21: mol_type = other DNA
ggggtggttaatgctgaacgg

SEQ ID NO: 7161 - DNA, 21 bp, synthetic construct
  source 1..21: mol_type = other DNA
atgatgaagtctgagacgggg

SEQ ID NO: 7162 - DNA, 21 bp, synthetic construct
  source 1..21: mol_type = other DNA
ggcatccaagacgtacgcatc

SEQ ID NO: 7163 - DNA, 21 bp, synthetic construct
  source 1..21: mol_type = other DNA
caaacaacggggcgatccagt

SEQ ID NO: 7164 - RNA, 21 nt, synthetic construct
  source 1..21: mol_type = other RNA
agaaaccagaacaacagccag

SEQ ID NO: 7165 - DNA, 21 bp, synthetic construct
  source 1..21: mol_type = other DNA
caaacaacgcggggatccagt

SEQ ID NO: 7166 - DNA, 21 bp, synthetic construct
  source 1..21: mol_type = other DNA
gtcaaaatatacggcgacctg

SEQ ID NO: 7167 - DNA, 21 bp, synthetic construct
  source 1..21: mol_type = other DNA
aaaagaaacaccagcgagaag

SEQ ID NO: 7168 - RNA, 21 nt, synthetic construct
  source 1..21: mol_type = other RNA
gacgacggcaagtacatcaga

SEQ ID NO: 7169 - RNA, 21 nt, synthetic construct
  source 1..21: mol_type = other RNA
ggccaggccagagtgcccacc

SEQ ID NO: 7170 - DNA, 21 bp, synthetic construct
  source 1..21: mol_type = other DNA
gcggatcggagtagggatggg

SEQ ID NO: 7171 - RNA, 21 nt, synthetic construct
  source 1..21: mol_type = other RNA
gtggagagaggcgtgaccccc

SEQ ID NO: 7172 - DNA, 21 bp, synthetic construct
  source 1..21: mol_type = other DNA
agaagcgacgtggtgagagac

SEQ ID NO: 7173 - DNA, 21 bp, synthetic construct
  source 1..21: mol_type = other DNA
gacaaaatatacggcgccctg

SEQ ID NO: 7174 - DNA, 21 bp, synthetic construct
  source 1..21: mol_type = other DNA
aacagtaacaccagcgagaag

SEQ ID NO: 7175 - DNA, 21 bp, synthetic construct
  source 1..21: mol_type = other DNA
aaaggtcagggtgtttctttt

SEQ ID NO: 7176 - DNA, 21 bp, synthetic construct
  source 1..21: mol_type = other DNA
gcgatgagtcttagtgagggg

SEQ ID NO: 7177 - DNA, 21 bp, synthetic construct
  source 1..21: mol_type = other DNA
aggaaggagccgatgattttg

SEQ ID NO: 7178 - RNA, 21 nt, synthetic construct
  source 1..21: mol_type = other RNA
gacgacgactcgacaacaggt

SEQ ID NO: 7179 - RNA, 21 nt, synthetic construct
  source 1..21: mol_type = other RNA
ggtggggttagtgaggggcgt

SEQ ID NO: 7180 - RNA, 21 nt, synthetic construct
  source 1..21: mol_type = other RNA
agcagagacgacaccgtgttc

SEQ ID NO: 7181 - RNA, 21 nt, synthetic construct
  source 1..21: mol_type = other RNA
cctgggagtagtaaggtgaat

SEQ ID NO: 7182 - DNA, 21 bp, synthetic construct
  source 1..21: mol_type = other DNA
cccggcctgagaggcaaggtg

SEQ ID NO: 7183 - DNA, 21 bp, synthetic construct
  source 1..21: mol_type = other DNA
gtgagcgacagcagcaaaaga

SEQ ID NO: 7184 - DNA, 21 bp, synthetic construct
  source 1..21: mol_type = other DNA
atgatgaagactgacacgggg

SEQ ID NO: 7185 - RNA, 21 nt, synthetic construct
  source 1..21: mol_type = other RNA
aaaatcgacaccttcaaagtc

SEQ ID NO: 7186 - DNA, 21 bp, synthetic construct
  source 1..21: mol_type = other DNA
atgatgaacactgagacgggg

SEQ ID NO: 7187 - RNA, 21 nt, synthetic construct
  source 1..21: mol_type = other RNA
aatggtcagggtgtttctatt

SEQ ID NO: 7188 - DNA, 21 bp, synthetic construct
  source 1..21: mol_type = other DNA
ggtgtgtctggtagtgatcag

SEQ ID NO: 7189 - DNA, 21 bp, synthetic construct
  source 1..21: mol_type = other DNA
ggcaccggcatggccctgaag

SEQ ID NO: 7190 - DNA, 21 bp, synthetic construct
  source 1..21: mol_type = other DNA
cagatcagaggctccgagatg

SEQ ID NO: 7191 - RNA, 21 nt, synthetic construct
  source 1..21: mol_type = other RNA
agtagtgagaagattccgagg

SEQ ID NO: 7192 - RNA, 21 nt, synthetic construct
  source 1..21: mol_type = other RNA
gtgacccaggcccaggcccag

SEQ ID NO: 7193 - DNA, 21 bp, synthetic construct
  source 1..21: mol_type = other DNA
ctgagcgacagcagcaacaga

SEQ ID NO: 7194 - DNA, 21 bp, synthetic construct
  source 1..21: mol_type = other DNA
ggggtggttaaagctgatcgg

SEQ ID NO: 7195 - RNA, 21 nt, synthetic construct
  source 1..21: mol_type = other RNA
ggcaacaagctgcacatcgac

SEQ ID NO: 7196 - RNA, 21 nt, synthetic construct
  source 1..21: mol_type = other RNA
ggctacggcctgaccggcaac

SEQ ID NO: 7197 - RNA, 21 nt, synthetic construct
  source 1..21: mol_type = other RNA
aagatgaccggcggcgacttc

SEQ ID NO: 7198 - DNA, 21 bp, synthetic construct
  source 1..21: mol_type = other DNA
aatggtcagggtgtttcttat

SEQ ID NO: 7199 - RNA, 21 nt, synthetic construct
  source 1..21: mol_type = other RNA
cagagaagcaccagcgtgggc

SEQ ID NO: 7200 - DNA, 21 bp, synthetic construct
  source 1..21: mol_type = other DNA
agtggtgagaggaatcaggag

SEQ ID NO: 7201 - DNA, 21 bp, synthetic construct
  source 1..21: mol_type = other DNA
gcggaacggactagggatggg

SEQ ID NO: 7202 - RNA, 21 nt, synthetic construct
  source 1..21: mol_type = other RNA
cacgtcaaatcatacgacacc

SEQ ID NO: 7203 - DNA, 21 bp, synthetic construct
  source 1..21: mol_type = other DNA
caagtggtggccgtgggcgtg

SEQ ID NO: 7204 - DNA, 21 bp, synthetic construct
  source 1..21: mol_type = other DNA
gggttggttaatgctgatcgg

SEQ ID NO: 7205 - DNA, 21 bp, synthetic construct
  source 1..21: mol_type = other DNA
ccgagtgtgaatttgggtgtt

SEQ ID NO: 7206 - DNA, 21 bp, synthetic construct
  source 1..21: mol_type = other DNA
cagatcagaggcaccgagata

SEQ ID NO: 7207 - RNA, 21 nt, synthetic construct
  source 1..21: mol_type = other RNA
cagatttataatacggcgcat

SEQ ID NO: 7208 - RNA, 21 nt, synthetic construct
  source 1..21: mol_type = other RNA
gtgctgggcgcccacagcgtg

SEQ ID NO: 7209 - RNA, 21 nt, synthetic construct
  source 1..21: mol_type = other RNA
accatgagcagcgccgacaga

SEQ ID NO: 7210 - RNA, 21 nt, synthetic construct
  source 1..21: mol_type = other RNA
atgatcaacagagtgagcacc

SEQ ID NO: 7211 - RNA, 21 nt, synthetic construct
  source 1..21: mol_type = other RNA
tctaaagtccaaaacgtcgac

SEQ ID NO: 7212 - RNA, 21 nt, synthetic construct
  source 1..21: mol_type = other RNA
cacgcccctcctgctatggtg

SEQ ID NO: 7213 - RNA, 21 nt, synthetic construct
  source 1..21: mol_type = other RNA
gagaagagtccgcctgtgatg

SEQ ID NO: 7214 - DNA, 21 bp, synthetic construct
  source 1..21: mol_type = other DNA
accagcagcccccccgtggag

SEQ ID NO: 7215 - RNA, 21 nt, synthetic construct
  source 1..21: mol_type = other RNA
gctaaggcgccggaggctggg

SEQ ID NO: 7216 - DNA, 21 bp, synthetic construct
  source 1..21: mol_type = other DNA
gtgagcgacagaagcaacaga

SEQ ID NO: 7217 - DNA, 21 bp, synthetic construct
  source 1..21: mol_type = other DNA
atcaggcaaggagtgagcgtg

SEQ ID NO: 7218 - RNA, 21 nt, synthetic construct
  source 1..21: mol_type = other RNA
gatttgtctcggcatacgctt

SEQ ID NO: 7219 - DNA, 21 bp, synthetic construct
  source 1..21: mol_type = other DNA
ttcgtcaaagacgtaagccaa

SEQ ID NO: 7220 - RNA, 21 nt, synthetic construct
  source 1..21: mol_type = other RNA
cccaccagaggcgagagcgtg

SEQ ID NO: 7221 - DNA, 21 bp, synthetic construct
  source 1..21: mol_type = other DNA
ggctccttgcaaacacaaaac

SEQ ID NO: 7222 - DNA, 21 bp, synthetic construct
  source 1..21: mol_type = other DNA
cagaagtctagtgatactagg

SEQ ID NO: 7223 - RNA, 21 nt, synthetic construct
  source 1..21: mol_type = other RNA
ggcatcgccatcgtggagaac

SEQ ID NO: 7224 - RNA, 21 nt, synthetic construct
  source 1..21: mol_type = other RNA
ggcgtgaacagcaccctgcag

SEQ ID NO: 7225 - DNA, 21 bp, synthetic construct
  source 1..21: mol_type = other DNA
ggctccatgcaaacacaaaaa

SEQ ID NO: 7226 - RNA, 21 nt, synthetic construct
  source 1..21: mol_type = other RNA
gactcacgagcgctgacagaa

SEQ ID NO: 7227 - RNA, 21 nt, synthetic construct
  source 1..21: mol_type = other RNA
gataaggcgccggagactggg

SEQ ID NO: 7228 - DNA, 21 bp, synthetic construct
  source 1..21: mol_type = other DNA
ggcatgcaagacctacgcatc

SEQ ID NO: 7229 - DNA, 21 bp, synthetic construct
  source 1..21: mol_type = other DNA
agcgagagcagacaggaggaa

SEQ ID NO: 7230 - DNA, 21 bp, synthetic construct
  source 1..21: mol_type = other DNA
gcgatgcgtcgtagtgagggg

SEQ ID NO: 7231 - RNA, 21 nt, synthetic construct
  source 1..21: mol_type = other RNA
gacgtggagaaccacggcaag

SEQ ID NO: 7232 - RNA, 21 nt, synthetic construct
  source 1..21: mol_type = other RNA
aacggcgtgagcagcgccatg

SEQ ID NO: 7233 - RNA, 21 nt, synthetic construct
  source 1..21: mol_type = other RNA
caggttttgaagaatggtgcg

SEQ ID NO: 7234 - DNA, 21 bp, synthetic construct
  source 1..21: mol_type = other DNA
caaacaacggggggatccaga

SEQ ID NO: 7235 - DNA, 21 bp, synthetic construct
  source 1..21: mol_type = other DNA
cacatcagaggcaccgagatg

SEQ ID NO: 7236 - DNA, 21 bp, synthetic construct
  source 1..21: mol_type = other DNA
aacgggcaaggagtgagcgtg

SEQ ID NO: 7237 - DNA, 21 bp, synthetic construct
  source 1..21: mol_type = other DNA
cccggcctgagcggcaagctg

SEQ ID NO: 7238 - DNA, 21 bp, synthetic construct
  source 1..21: mol_type = other DNA
agggtggttaatgctgatcgg

SEQ ID NO: 7239 - RNA, 21 nt, synthetic construct
  source 1..21: mol_type = other RNA
ggatacgaaaacaaccaacac

SEQ ID NO: 7240 - RNA, 21 nt, synthetic construct
  source 1..21: mol_type = other RNA
agcatgaacggcgtgaccaac

SEQ ID NO: 7241 - DNA, 21 bp, synthetic construct
  source 1..21: mol_type = other DNA
agcgagagaagacaggaggac

SEQ ID NO: 7242 - DNA, 21 bp, synthetic construct
  source 1..21: mol_type = other DNA
ggcatgcaagaagtacgcatc

SEQ ID NO: 7243 - DNA, 21 bp, synthetic construct
  source 1..21: mol_type = other DNA
cacggcctgagcggcaaggtg

SEQ ID NO: 7244 - RNA, 21 nt, synthetic construct
  source 1..21: mol_type = other RNA
agtaggacggagagttcgcag

SEQ ID NO: 7245 - DNA, 21 bp, synthetic construct
  source 1..21: mol_type = other DNA
ggctccatgcaaaaacaaaac

SEQ ID NO: 7246 - DNA, 21 bp, synthetic construct
  source 1..21: mol_type = other DNA
gtcttccaacaacgacacgtt

SEQ ID NO: 7247 - DNA, 21 bp, synthetic construct
  source 1..21: mol_type = other DNA
gccagcaccggcatcaacctg

SEQ ID NO: 7248 - DNA, 21 bp, synthetic construct
  source 1..21: mol_type = other DNA
ggcaccggcatggccgagaag

SEQ ID NO: 7249 - DNA, 21 bp, synthetic construct
  source 1..21: mol_type = other DNA
agcgagagcagacacgaggac

SEQ ID NO: 7250 - DNA, 21 bp, synthetic construct
  source 1..21: mol_type = other DNA
gttgctcgtcaggagcatatg

SEQ ID NO: 7251 - DNA, 21 bp, synthetic construct
  source 1..21: mol_type = other DNA
cccggcctgagcggcaacgtg

SEQ ID NO: 7252 - DNA, 21 bp, synthetic construct
  source 1..21: mol_type = other DNA
cagacgtctactgatactagg

SEQ ID NO: 7253 - RNA, 21 nt, synthetic construct
  source 1..21: mol_type = other RNA
catacgcggggtgagaatgag

SEQ ID NO: 7254 - RNA, 21 nt, synthetic construct
  source 1..21: mol_type = other RNA
ggattcgcccaccaagacgca

SEQ ID NO: 7255 - RNA, 21 nt, synthetic construct
  source 1..21: mol_type = other RNA
gagaagagccccaccgtgatg

SEQ ID NO: 7256 - RNA, 21 nt, synthetic construct
  source 1..21: mol_type = other RNA
caaaccaaagtggactcagtc

SEQ ID NO: 7257 - RNA, 21 nt, synthetic construct
  source 1..21: mol_type = other RNA
agccaagcagccgaatcacac

SEQ ID NO: 7258 - DNA, 21 bp, synthetic construct
  source 1..21: mol_type = other DNA
accagcagccccccgttgtgc

SEQ ID NO: 7259 - RNA, 21 nt, synthetic construct
  source 1..21: mol_type = other RNA
cccgagaacaccaagatcaac

SEQ ID NO: 7260 - DNA, 21 bp, synthetic construct
  source 1..21: mol_type = other DNA
agaagcgacgtggtgagcgaa

SEQ ID NO: 7261 - DNA, 21 bp, synthetic construct
  source 1..21: mol_type = other DNA
accagcagccccaccgtggtg

SEQ ID NO: 7262 - DNA, 21 bp, synthetic construct
  source 1..21: mol_type = other DNA
agaagcgacctggtgagcgac

SEQ ID NO: 7263 - DNA, 21 bp, synthetic construct
  source 1..21: mol_type = other DNA
accagcagcacccccgtggtg

SEQ ID NO: 7264 - RNA, 21 nt, synthetic construct
  source 1..21: mol_type = other RNA
gacaaaaacgcatctactgga

SEQ ID NO: 7265 - DNA, 21 bp, synthetic construct
  source 1..21: mol_type = other DNA
gtgggcagcgtgagaatcgac

SEQ ID NO: 7266 - DNA, 21 bp, synthetic construct
  source 1..21: mol_type = other DNA
gcgatgcgtgttagtgagggg

SEQ ID NO: 7267 - DNA, 21 bp, synthetic construct
  source 1..21: mol_type = other DNA
ggcagccacaacgagaccccc

SEQ ID NO: 7268 - RNA, 21 nt, synthetic construct
  source 1..21: mol_type = other RNA
acatcgcaccaagtgtctatg

SEQ ID NO: 7269 - DNA, 21 bp, synthetic construct
  source 1..21: mol_type = other DNA
accagcagcccccccttgttg

SEQ ID NO: 7270 - DNA, 21 bp, synthetic construct
  source 1..21: mol_type = other DNA
gtcaaaataaacggcgccctg

SEQ ID NO: 7271 - RNA, 21 nt, synthetic construct
  source 1..21: mol_type = other RNA
ggggtaatcaaaacactgctc

SEQ ID NO: 7272 - DNA, 21 bp, synthetic construct
  source 1..21: mol_type = other DNA
agcgagagcagtcaggaggac

SEQ ID NO: 7273 - DNA, 21 bp, synthetic construct
  source 1..21: mol_type = other DNA
accagcagcccccccttgttc

SEQ ID NO: 7274 - DNA, 21 bp, synthetic construct
  source 1..21: mol_type = other DNA
agaagcgacgtgctgagcgac

SEQ ID NO: 7275 - RNA, 21 nt, synthetic construct
  source 1..21: mol_type = other RNA
gtgctgagccccaacatcgcc

SEQ ID NO: 7276 - RNA, 21 nt, synthetic construct
  source 1..21: mol_type = other RNA
gggcttgtccaaaacgtcgac

SEQ ID NO: 7277 - RNA, 21 nt, synthetic construct
  source 1..21: mol_type = other RNA
acgggcaaaggagtggaactt

SEQ ID NO: 7278 - RNA, 21 nt, synthetic construct
  source 1..21: mol_type = other RNA
accatcaacaaggtgatcatc

SEQ ID NO: 7279 - DNA, 21 bp, synthetic construct
  source 1..21: mol_type = other DNA
agcggcagaaacaacagcctg

SEQ ID NO: 7280 - DNA, 21 bp, synthetic construct
  source 1..21: mol_type = other DNA
actacgcggggtgagaatgag

SEQ ID NO: 7281 - RNA, 21 nt, synthetic construct
  source 1..21: mol_type = other RNA
accatagaaaggacggctaac

SEQ ID NO: 7282 - RNA, 21 nt, synthetic construct
  source 1..21: mol_type = other RNA
tttggttatgggagtaataat

SEQ ID NO: 7283 - RNA, 21 nt, synthetic construct
  source 1..21: mol_type = other RNA
ggtatgtcgcgggtgagtgat

SEQ ID NO: 7284 - RNA, 21 nt, synthetic construct
  source 1..21: mol_type = other RNA
agctacctgccccaggtgacc

SEQ ID NO: 7285 - DNA, 21 bp, synthetic construct
  source 1..21: mol_type = other DNA
atcgggcaaggagtgagcctg

SEQ ID NO: 7286 - RNA, 21 nt, synthetic construct
  source 1..21: mol_type = other RNA
ggcctgggcggccccagagag

SEQ ID NO: 7287 - DNA, 21 bp, synthetic construct
  source 1..21: mol_type = other DNA
cagacgtatagtgatactagg

SEQ ID NO: 7288 - RNA, 21 nt, synthetic construct
  source 1..21: mol_type = other RNA
gttatcgcgacaaaaagcatc

SEQ ID NO: 7289 - RNA, 21 nt, synthetic construct
  source 1..21: mol_type = other RNA
gggcagtcgcgggttccgatg

SEQ ID NO: 7290 - DNA, 21 bp, synthetic construct
  source 1..21: mol_type = other DNA
ggcaccggcatggccgtgaat

SEQ ID NO: 7291 - DNA, 21 bp, synthetic construct
  source 1..21: mol_type = other DNA
gtcttccaacaaggacaagtt

SEQ ID NO: 7292 - DNA, 21 bp, synthetic construct
  source 1..21: mol_type = other DNA
gcggctactgggattaagtag

SEQ ID NO: 7293 - RNA, 21 nt, synthetic construct
  source 1..21: mol_type = other RNA
agaagcgtgtggaccgagcag

SEQ ID NO: 7294 - RNA, 21 nt, synthetic construct
  source 1..21: mol_type = other RNA
gtgatcagcgccaagcacgag

SEQ ID NO: 7295 - DNA, 21 bp, synthetic construct
  source 1..21: mol_type = other DNA
accagaagcccccccgtggtg

SEQ ID NO: 7296 - DNA, 21 bp, synthetic construct
  source 1..21: mol_type = other DNA
gcgatgcgtcttagtgggggg

SEQ ID NO: 7297 - DNA, 21 bp, synthetic construct
  source 1..21: mol_type = other DNA
cctacgcggcgtgagaatgag

SEQ ID NO: 7298 - RNA, 21 nt, synthetic construct
  source 1..21: mol_type = other RNA
cgaaactactctaccctcgtg

SEQ ID NO: 7299 - DNA, 21 bp, synthetic construct
  source 1..21: mol_type = other DNA
agctcccaaaaaaacaagcct

SEQ ID NO: 7300 - DNA, 21 bp, synthetic construct
  source 1..21: mol_type = other DNA
accagcagcccccccgaggtg

SEQ ID NO: 7301 - DNA, 21 bp, synthetic construct
  source 1..21: mol_type = other DNA
gcggatcggactagcgatggg

SEQ ID NO: 7302 - DNA, 21 bp, synthetic construct
  source 1..21: mol_type = other DNA
aagatgaagactgagacgggg

SEQ ID NO: 7303 - RNA, 21 nt, synthetic construct
  source 1..21: mol_type = other RNA
attggtaagcagacgtatgat

SEQ ID NO: 7304 - RNA, 21 nt, synthetic construct
  source 1..21: mol_type = other RNA
ttgaacgtcgcaggtctgatg

SEQ ID NO: 7305 - DNA, 21 bp, synthetic construct
  source 1..21: mol_type = other DNA
atcgggcaaggagtgagagtg

SEQ ID NO: 7306 - DNA, 21 bp, synthetic construct
  source 1..21: mol_type = other DNA
cccagcagaggcgagaacgag

SEQ ID NO: 7307 - RNA, 21 nt, synthetic construct
  source 1..21: mol_type = other RNA
aaggtggagttcaacagagtg

SEQ ID NO: 7308 - DNA, 21 bp, synthetic construct
  source 1..21: mol_type = other DNA
cccaacctgcagcagagacag

SEQ ID NO: 7309 - RNA, 21 nt, synthetic construct
  source 1..21: mol_type = other RNA
aaggacagaaacgacaacgcc

SEQ ID NO: 7310 - RNA, 21 nt, synthetic construct
  source 1..21: mol_type = other RNA
acggaaacagggacccttctc

SEQ ID NO: 7311 - DNA, 21 bp, synthetic construct
  source 1..21: mol_type = other DNA
cagacgtctagtcatactagg

SEQ ID NO: 7312 - DNA, 21 bp, synthetic construct
  source 1..21: mol_type = other DNA
gtctccatgcaaacacaaaac

SEQ ID NO: 7313 - DNA, 21 bp, synthetic construct
  source 1..21: mol_type = other DNA
gttgctagtgaggagcatatg

SEQ ID NO: 7314 - RNA, 21 nt, synthetic construct
  source 1..21: mol_type = other RNA
accctgctgcccggctacctg

SEQ ID NO: 7315 - RNA, 21 nt, synthetic construct
  source 1..21: mol_type = other RNA
accctgaacggcgcctacaag

SEQ ID NO: 7316 - DNA, 21 bp, synthetic construct
  source 1..21: mol_type = other DNA
gcggatcggactagggatcgg

SEQ ID NO: 7317 - RNA, 21 nt, synthetic construct
  source 1..21: mol_type = other RNA
accatcgagagaaccgccatg

SEQ ID NO: 7318 - DNA, 21 bp, synthetic construct
  source 1..21: mol_type = other DNA
gttgatcgtgaggagcatatg

SEQ ID NO: 7319 - DNA, 21 bp, synthetic construct
  source 1..21: mol_type = other DNA
aacagatccgttgtcaaatct

SEQ ID NO: 7320 - RNA, 21 nt, synthetic construct
  source 1..21: mol_type = other RNA
caggacggcagcagcaccgtg

SEQ ID NO: 7321 - RNA, 21 nt, synthetic construct
  source 1..21: mol_type = other RNA
cccaccagaggcgtgaacgtg

SEQ ID NO: 7322 - DNA, 21 bp, synthetic construct
  source 1..21: mol_type = other DNA
caaataaaaccgatcgatcgg

SEQ ID NO: 7323 - DNA, 21 bp, synthetic construct
  source 1..21: mol_type = other DNA
cctacgcggggtgagaatcag

SEQ ID NO: 7324 - RNA, 21 nt, synthetic construct
  source 1..21: mol_type = other RNA
atgtactacgaacggacgatc

SEQ ID NO: 7325 - DNA, 21 bp, synthetic construct
  source 1..21: mol_type = other DNA
caaataaaacagatcgaacgg

SEQ ID NO: 7326 - RNA, 21 nt, synthetic construct
  source 1..21: mol_type = other RNA
actggtaaggggattgtgttg

SEQ ID NO: 7327 - RNA, 21 nt, synthetic construct
  source 1..21: mol_type = other RNA
gtgagccaggagcccagcaga

SEQ ID NO: 7328 - DNA, 21 bp, synthetic construct
  source 1..21: mol_type = other DNA
atcgggcaacgagtgagcgtg

SEQ ID NO: 7329 - DNA, 21 bp, synthetic construct
  source 1..21: mol_type = other DNA
accagcagcccccacgtggtg

SEQ ID NO: 7330 - DNA, 21 bp, synthetic construct
  source 1..21: mol_type = other DNA
gtcaaaatataaggcgccctg

SEQ ID NO: 7331 - DNA, 21 bp, synthetic construct
  source 1..21: mol_type = other DNA
accagcagccccccgtggtgc

SEQ ID NO: 7332 - RNA, 21 nt, synthetic construct
  source 1..21: mol_type = other RNA
acacggagcccacccgtcagc

SEQ ID NO: 7333 - DNA, 21 bp, synthetic construct
  source 1..21: mol_type = other DNA
aacataaacaccagcgagaag

SEQ ID NO: 7334 - DNA, 21 bp, synthetic construct
  source 1..21: mol_type = other DNA
gcgatgcgtcttagtcagggg

SEQ ID NO: 7335 - RNA, 21 nt, synthetic construct
  source 1..21: mol_type = other RNA
accatccaccagggcatcaag

SEQ ID NO: 7336 - RNA, 21 nt, synthetic construct
  source 1..21: mol_type = other RNA
gaaatcaaagaccgggttctc

SEQ ID NO: 7337 - DNA, 21 bp, synthetic construct
  source 1..21: mol_type = other DNA
agcgagagcagacaggacgac

SEQ ID NO: 7338 - DNA, 21 bp, synthetic construct
  source 1..21: mol_type = other DNA
aacagaaaaacaagagagaag

SEQ ID NO: 7339 - DNA, 21 bp, synthetic construct
  source 1..21: mol_type = other DNA
cagatcagtggcaccgagatg

SEQ ID NO: 7340 - RNA, 21 nt, synthetic construct
  source 1..21: mol_type = other RNA
cgtgataggtggaattcggaa

SEQ ID NO: 7341 - DNA, 21 bp, synthetic construct
  source 1..21: mol_type = other DNA
caaataaacccgatcgaacgg

SEQ ID NO: 7342 - RNA, 21 nt, synthetic construct
  source 1..21: mol_type = other RNA
gttgaaaacggtgtcgacaaa

SEQ ID NO: 7343 - DNA, 21 bp, synthetic construct
  source 1..21: mol_type = other DNA
caaataaaaacgatcgaacgg

SEQ ID NO: 7344 - DNA, 21 bp, synthetic construct
  source 1..21: mol_type = other DNA
cagacgtctagagaaactagg

SEQ ID NO: 7345 - DNA, 21 bp, synthetic construct
  source 1..21: mol_type = other DNA
aatggtcagggtgattctttt

SEQ ID NO: 7346 - DNA, 21 bp, synthetic construct
  source 1..21: mol_type = other DNA
gcgatgcgtctagtgaggggc

SEQ ID NO: 7347 - DNA, 21 bp, synthetic construct
  source 1..21: mol_type = other DNA
gccggcaccggcatcaagctg

SEQ ID NO: 7348 - RNA, 21 nt, synthetic construct
  source 1..21: mol_type = other RNA
gacgtggagaacaccggcaag

SEQ ID NO: 7349 - DNA, 21 bp, synthetic construct
  source 1..21: mol_type = other DNA
ataagggccatgggcggtctg

SEQ ID NO: 7350 - DNA, 21 bp, synthetic construct
  source 1..21: mol_type = other DNA
ggcagcaagctggccacccac

SEQ ID NO: 7351 - DNA, 21 bp, synthetic construct
  source 1..21: mol_type = other DNA
accatcagccccagcagcaga

SEQ ID NO: 7352 - DNA, 21 bp, synthetic construct
  source 1..21: mol_type = other DNA
gcgatgcgtcttagtgaggcg

SEQ ID NO: 7353 - RNA, 21 nt, synthetic construct
  source 1..21: mol_type = other RNA
ggtcaaatgaggagcgacgta

SEQ ID NO: 7354 - RNA, 21 nt, synthetic construct
  source 1..21: mol_type = other RNA
ccaagactggacgtgaaccga

SEQ ID NO: 7355 - RNA, 21 nt, synthetic construct
  source 1..21: mol_type = other RNA
aatagtggtgataaacagctg

SEQ ID NO: 7356 - DNA, 21 bp, synthetic construct
  source 1..21: mol_type = other DNA
ggtctgtctggtagggatcag

SEQ ID NO: 7357 - DNA, 21 bp, synthetic construct
  source 1..21: mol_type = other DNA
gcccggaaagttacagaaggg

SEQ ID NO: 7358 - DNA, 21 bp, synthetic construct
  source 1..21: mol_type = other DNA
ggctacatgcaaacacaaaac

SEQ ID NO: 7359 - DNA, 21 bp, synthetic construct
  source 1..21: mol_type = other DNA
gtcatccaacaaggacacgtt

SEQ ID NO: 7360 - DNA, 21 bp, synthetic construct
  source 1..21: mol_type = other DNA
agacacgtgcacagcaacgac

SEQ ID NO: 7361 - RNA, 21 nt, synthetic construct
  source 1..21: mol_type = other RNA
tcgaagaatgggattactaat

SEQ ID NO: 7362 - DNA, 21 bp, synthetic construct
  source 1..21: mol_type = other DNA
cagatcagaggcaccgacatg

SEQ ID NO: 7363 - DNA, 21 bp, synthetic construct
  source 1..21: mol_type = other DNA
accatcagccccagaagcagc

SEQ ID NO: 7364 - RNA, 21 nt, synthetic construct
  source 1..21: mol_type = other RNA
ggtgctcgtggggagcatatg

SEQ ID NO: 7365 - RNA, 21 nt, synthetic construct
  source 1..21: mol_type = other RNA
ggcatccaagccaatgcccac

SEQ ID NO: 7366 - RNA, 21 nt, synthetic construct
  source 1..21: mol_type = other RNA
gaaaaaggcccacacatcgcc

SEQ ID NO: 7367 - DNA, 21 bp, synthetic construct
  source 1..21: mol_type = other DNA
gggagtctgactcagactcaa

SEQ ID NO: 7368 - DNA, 21 bp, synthetic construct
  source 1..21: mol_type = other DNA
gggagtctgagtcagactcat

SEQ ID NO: 7369 - DNA, 21 bp, synthetic construct
  source 1..21: mol_type = other DNA
ggctccatgcaaacaaaaaac

SEQ ID NO: 7370 - DNA, 21 bp, synthetic construct
  source 1..21: mol_type = other DNA
gggtaaggggataatcagcat

SEQ ID NO: 7371 - RNA, 21 nt, synthetic construct
  source 1..21: mol_type = other RNA
gacctgagaaccagcaccctg

SEQ ID NO: 7372 - RNA, 21 nt, synthetic construct
  source 1..21: mol_type = other RNA
gagtatggggcgcatagtgtt

SEQ ID NO: 7373 - RNA, 21 nt, synthetic construct
  source 1..21: mol_type = other RNA
gggtatgggttctctgggaat

SEQ ID NO: 7374 - DNA, 21 bp, synthetic construct
  source 1..21: mol_type = other DNA
cggagtctgactcagactcat

SEQ ID NO: 7375 - DNA, 21 bp, synthetic construct
  source 1..21: mol_type = other DNA
gcgatgcgtcttactgagggg

SEQ ID NO: 7376 - DNA, 21 bp, synthetic construct
  source 1..21: mol_type = other DNA
cagacgtctagtgatactacg

SEQ ID NO: 7377 - RNA, 21 nt, synthetic construct
  source 1..21: mol_type = other RNA
cggacctccaacggcgacatc

SEQ ID NO: 7378 - DNA, 21 bp, synthetic construct
  source 1..21: mol_type = other DNA
agcgacagcagacaggaggac

SEQ ID NO: 7379 - RNA, 21 nt, synthetic construct
  source 1..21: mol_type = other RNA
aacggcgagagaaaccaggtg

SEQ ID NO: 7380 - RNA, 21 nt, synthetic construct
  source 1..21: mol_type = other RNA
accatcaaccccagcagcagc

SEQ ID NO: 7381 - DNA, 21 bp, synthetic construct
  source 1..21: mol_type = other DNA
cagacgtctagtgataatagg

SEQ ID NO: 7382 - DNA, 21 bp, synthetic construct
  source 1..21: mol_type = other DNA
agacacgtgcaaagcaaggac

SEQ ID NO: 7383 - RNA, 21 nt, synthetic construct
  source 1..21: mol_type = other RNA
agcgagaagaacgagggcctg

SEQ ID NO: 7384 - RNA, 21 nt, synthetic construct
  source 1..21: mol_type = other RNA
ggtatgacgcagaagatgatg

SEQ ID NO: 7385 - DNA, 21 bp, synthetic construct
  source 1..21: mol_type = other DNA
ttggtcaaagacctaagccaa

SEQ ID NO: 7386 - RNA, 21 nt, synthetic construct
  source 1..21: mol_type = other RNA
gaaaaaggccctctcgtggcc

SEQ ID NO: 7387 - RNA, 21 nt, synthetic construct
  source 1..21: mol_type = other RNA
cgcagccccaacaacagcgaa

SEQ ID NO: 7388 - DNA, 21 bp, synthetic construct
  source 1..21: mol_type = other DNA
cctacgcggggtgtgaatgag

SEQ ID NO: 7389 - DNA, 21 bp, synthetic construct
  source 1..21: mol_type = other DNA
ggcagacacaacgacaccccc

SEQ ID NO: 7390 - DNA, 21 bp, synthetic construct
  source 1..21: mol_type = other DNA
gttgctcgtgaggagaatatg

SEQ ID NO: 7391 - RNA, 21 nt, synthetic construct
  source 1..21: mol_type = other RNA
attggttggaataatagtgtt

SEQ ID NO: 7392 - DNA, 21 bp, synthetic construct
  source 1..21: mol_type = other DNA
cccaccagaggcgagagcgag

SEQ ID NO: 7393 - DNA, 21 bp, synthetic construct
  source 1..21: mol_type = other DNA
atcgggcaaggactgagcgtg

SEQ ID NO: 7394 - RNA, 21 nt, synthetic construct
  source 1..21: mol_type = other RNA
gtggaccagaagagcgtgacc

SEQ ID NO: 7395 - DNA, 21 bp, synthetic construct
  source 1..21: mol_type = other DNA
ggcatgcaagacgtaagcatc

SEQ ID NO: 7396 - RNA, 21 nt, synthetic construct
  source 1..21: mol_type = other RNA
aaggtggtcaccagcgcaatg

SEQ ID NO: 7397 - RNA, 21 nt, synthetic construct
  source 1..21: mol_type = other RNA
gccagaaccggcatcaagctg

SEQ ID NO: 7398 - DNA, 21 bp, synthetic construct
  source 1..21: mol_type = other DNA
cagatcagaggcaacgagatg

SEQ ID NO: 7399 - RNA, 21 nt, synthetic construct
  source 1..21: mol_type = other RNA
gaaagagacgggaacaacttg

SEQ ID NO: 7400 - RNA, 21 nt, synthetic construct
  source 1..21: mol_type = other RNA
ggcggcgccggcctgaaggac

SEQ ID NO: 7401 - DNA, 21 bp, synthetic construct
  source 1..21: mol_type = other DNA
agacacctgcacagcaaggac

SEQ ID NO: 7402 - DNA, 21 bp, synthetic construct
  source 1..21: mol_type = other DNA
ttggtcaaagacgtaagacaa

SEQ ID NO: 7403 - DNA, 21 bp, synthetic construct
  source 1..21: mol_type = other DNA
gggagtctgactcacactcat

SEQ ID NO: 7404 - RNA, 21 nt, synthetic construct
  source 1..21: mol_type = other RNA
caagtcttaatcaacggagct

SEQ ID NO: 7405 - DNA, 21 bp, synthetic construct
  source 1..21: mol_type = other DNA
gccagctccggcatcaagctg

SEQ ID NO: 7406 - DNA, 21 bp, synthetic construct
  source 1..21: mol_type = other DNA
ggcaccggcatggacgtgaag

SEQ ID NO: 7407 - DNA, 21 bp, synthetic construct
  source 1..21: mol_type = other DNA
cctgcgcggggtgagaatgag

SEQ ID NO: 7408 - DNA, 21 bp, synthetic construct
  source 1..21: mol_type = other DNA
gacgtgaagagagacacccag

SEQ ID NO: 7409 - DNA, 21 bp, synthetic construct
  source 1..21: mol_type = other DNA
cctacgcgggctgagaatgag

SEQ ID NO: 7410 - DNA, 21 bp, synthetic construct
  source 1..21: mol_type = other DNA
tccagcagcccccccgtggtg

SEQ ID NO: 7411 - DNA, 21 bp, synthetic construct
  source 1..21: mol_type = other DNA
ggaaacgaaaacaaccaacac

SEQ ID NO: 7412 - DNA, 21 bp, synthetic construct
  source 1..21: mol_type = other DNA
agacacgtgcacagcaaggaa

SEQ ID NO: 7413 - DNA, 21 bp, synthetic construct
  source 1..21: mol_type = other DNA
gacagcaccggcatcaagctg

SEQ ID NO: 7414 - DNA, 21 bp, synthetic construct
  source 1..21: mol_type = other DNA
gtcaaaaaatacggcgccctg

SEQ ID NO: 7415 - DNA, 21 bp, synthetic construct
  source 1..21: mol_type = other DNA
ggcataatgagaaccaaaaac

SEQ ID NO: 7416 - RNA, 21 nt, synthetic construct
  source 1..21: mol_type = other RNA
atgaaagaaaaaatcatactc

SEQ ID NO: 7417 - DNA, 21 bp, synthetic construct
  source 1..21: mol_type = other DNA
gagactgctacgaagagaatt

SEQ ID NO: 7418 - DNA, 21 bp, synthetic construct
  source 1..21: mol_type = other DNA
atgacgatcggtaacggctta

SEQ ID NO: 7419 - DNA, 21 bp, synthetic construct
  source 1..21: mol_type = other DNA
agaaaccagaacaacagccac

SEQ ID NO: 7420 - DNA, 21 bp, synthetic construct
  source 1..21: mol_type = other DNA
aatggtcagggtgttactttt

SEQ ID NO: 7421 - DNA, 21 bp, synthetic construct
  source 1..21: mol_type = other DNA
aagacgtctagtgatactagg

SEQ ID NO: 7422 - DNA, 21 bp, synthetic construct
  source 1..21: mol_type = other DNA
agccacgtgcacagcaaggac

SEQ ID NO: 7423 - DNA, 21 bp, synthetic construct
  source 1..21: mol_type = other DNA
gtcaaaatatacggcgccatg

SEQ ID NO: 7424 - RNA, 21 nt, synthetic construct
  source 1..21: mol_type = other RNA
cagattcgtggtatggaggtg

SEQ ID NO: 7425 - DNA, 21 bp, synthetic construct
  source 1..21: mol_type = other DNA
agaaaacagaacaacagccag

SEQ ID NO: 7426 - DNA, 21 bp, synthetic construct
  source 1..21: mol_type = other DNA
gagatgcgtcttagtgagggg

SEQ ID NO: 7427 - RNA, 21 nt, synthetic construct
  source 1..21: mol_type = other RNA
tccctccttaaaaacgtcgac

SEQ ID NO: 7428 - RNA, 21 nt, synthetic construct
  source 1..21: mol_type = other RNA
ggcagacacaacgagaccacc

SEQ ID NO: 7429 - DNA, 21 bp, synthetic construct
  source 1..21: mol_type = other DNA
agaaaccacaacaacagccag

SEQ ID NO: 7430 - DNA, 21 bp, synthetic construct
  source 1..21: mol_type = other DNA
gagactgctacgaatagtatt

SEQ ID NO: 7431 - RNA, 21 nt, synthetic construct
  source 1..21: mol_type = other RNA
gacgaggagaaccccggcaag

SEQ ID NO: 7432 - DNA, 21 bp, synthetic construct
  source 1..21: mol_type = other DNA
ccgaataatcttcatagatct

SEQ ID NO: 7433 - DNA, 21 bp, synthetic construct
  source 1..21: mol_type = other DNA
cctacgcggggtgagaatgat

SEQ ID NO: 7434 - RNA, 21 nt, synthetic construct
  source 1..21: mol_type = other RNA
ggggtggaaaaagctgatcgg

SEQ ID NO: 7435 - DNA, 21 bp, synthetic construct
  source 1..21: mol_type = other DNA
aaggtggagttaaacagagtg

SEQ ID NO: 7436 - DNA, 21 bp, synthetic construct
  source 1..21: mol_type = other DNA
ggctccatgcatacacaaaac

SEQ ID NO: 7437 - RNA, 21 nt, synthetic construct
  source 1..21: mol_type = other RNA
agaagagacgtggtgagcgac

SEQ ID NO: 7438 - DNA, 21 bp, synthetic construct
  source 1..21: mol_type = other DNA
ttggtcaaagaagtaagccaa

SEQ ID NO: 7439 - DNA, 21 bp, synthetic construct
  source 1..21: mol_type = other DNA
ggctccaagcaaacacaaaac

SEQ ID NO: 7440 - DNA, 21 bp, synthetic construct
  source 1..21: mol_type = other DNA
agaaaccagaacaacagacag

SEQ ID NO: 7441 - RNA, 21 nt, synthetic construct
  source 1..21: mol_type = other RNA
ttgagggtgcgtgatgggtat

SEQ ID NO: 7442 - DNA, 21 bp, synthetic construct
  source 1..21: mol_type = other DNA
cagatcagaggcaccgagaag

SEQ ID NO: 7443 - DNA, 21 bp, synthetic construct
  source 1..21: mol_type = other DNA
aatggtcagggtgtttatttt

SEQ ID NO: 7444 - DNA, 21 bp, synthetic construct
  source 1..21: mol_type = other DNA
tatcatggggctgagtcgcgt

SEQ ID NO: 7445 - RNA, 21 nt, synthetic construct
  source 1..21: mol_type = other RNA
gataaggttggggttgctgtt

SEQ ID NO: 7446 - RNA, 21 nt, synthetic construct
  source 1..21: mol_type = other RNA
ggcagcaacctggccaccccc

SEQ ID NO: 7447 - RNA, 21 nt, synthetic construct
  source 1..21: mol_type = other RNA
atctacgactacagccacacc

SEQ ID NO: 7448 - DNA, 21 bp, synthetic construct
  source 1..21: mol_type = other DNA
gtctaccaacaaggacacgtt

SEQ ID NO: 7449 - RNA, 21 nt, synthetic construct
  source 1..21: mol_type = other RNA
ggctacgtgctgaagagcgcc

SEQ ID NO: 7450 - RNA, 21 nt, synthetic construct
  source 1..21: mol_type = other RNA
gcaaaagaaatgcgtgctctg

SEQ ID NO: 7451 - DNA, 21 bp, synthetic construct
  source 1..21: mol_type = other DNA
agagagagcagacaggaggac

SEQ ID NO: 7452 - DNA, 21 bp, synthetic construct
  source 1..21: mol_type = other DNA
gcgatgcgtattagtgagggg

SEQ ID NO: 7453 - DNA, 21 bp, synthetic construct
  source 1..21: mol_type = other DNA
ggcagcaagctggcccccccc

SEQ ID NO: 7454 - DNA, 21 bp, synthetic construct
  source 1..21: mol_type = other DNA
ggcatgaaagacgtacgcatc

SEQ ID NO: 7455 - DNA, 21 bp, synthetic construct
  source 1..21: mol_type = other DNA
accatcagccaagtcaccaac

SEQ ID NO: 7456 - RNA, 21 nt, synthetic construct
  source 1..21: mol_type = other RNA
ctgatgaacggcatcaccaac

SEQ ID NO: 7457 - DNA, 21 bp, synthetic construct
  source 1..21: mol_type = other DNA
accatcagacacgtcaccaac

SEQ ID NO: 7458 - DNA, 21 bp, synthetic construct
  source 1..21: mol_type = other DNA
cacgtgctggccgtgggcgtg

SEQ ID NO: 7459 - DNA, 21 bp, synthetic construct
  source 1..21: mol_type = other DNA
cagatcagaggcaccgagttg

SEQ ID NO: 7460 - DNA, 21 bp, synthetic construct
  source 1..21: mol_type = other DNA
gacactgctacgaagagtatt

SEQ ID NO: 7461 - RNA, 21 nt, synthetic construct
  source 1..21: mol_type = other RNA
gcgatgaatgggattactaat

SEQ ID NO: 7462 - DNA, 21 bp, synthetic construct
  source 1..21: mol_type = other DNA
agtagcgacgtggtgagcgac

SEQ ID NO: 7463 - RNA, 21 nt, synthetic construct
  source 1..21: mol_type = other RNA
gctcgcaacgtcatcggagga

SEQ ID NO: 7464 - DNA, 21 bp, synthetic construct
  source 1..21: mol_type = other DNA
gtcttccaacaagaacacgtt

SEQ ID NO: 7465 - DNA, 21 bp, synthetic construct
  source 1..21: mol_type = other DNA
ggcagacacaaagagaccccc

SEQ ID NO: 7466 - DNA, 21 bp, synthetic construct
  source 1..21: mol_type = other DNA
aaagccatcgacggcatcctg

SEQ ID NO: 7467 - DNA, 21 bp, synthetic construct
  source 1..21: mol_type = other DNA
cctaagcggggtgagaatgag

SEQ ID NO: 7468 - RNA, 21 nt, synthetic construct
  source 1..21: mol_type = other RNA
tcccaaggtcccgaatctctg

SEQ ID NO: 7469 - DNA, 21 bp, synthetic construct
  source 1..21: mol_type = other DNA
ggcataatcagaacccaaaac

SEQ ID NO: 7470 - RNA, 21 nt, synthetic construct
  source 1..21: mol_type = other RNA
aacgtggtcagctcggtgatg

SEQ ID NO: 7471 - RNA, 21 nt, synthetic construct
  source 1..21: mol_type = other RNA
cctacgcggggtgagaatgtg

SEQ ID NO: 7472 - RNA, 21 nt, synthetic construct
  source 1..21: mol_type = other RNA
aggctcaaccacgtcgacaca

SEQ ID NO: 7473 - DNA, 21 bp, synthetic construct
  source 1..21: mol_type = other DNA
ccttaagatagtcctacgagt

SEQ ID NO: 7474 - DNA, 21 bp, synthetic construct
  source 1..21: mol_type = other DNA
gggagactgactcagactcat

SEQ ID NO: 7475 - DNA, 21 bp, synthetic construct
  source 1..21: mol_type = other DNA
aacagaaacaccaccgagaag

SEQ ID NO: 7476 - DNA, 21 bp, synthetic construct
  source 1..21: mol_type = other DNA
gagatcagcgccaagcacgag

SEQ ID NO: 7477 - DNA, 21 bp, synthetic construct
  source 1..21: mol_type = other DNA
gttggtcgtgaggagcatatg

SEQ ID NO: 7478 - DNA, 21 bp, synthetic construct
  source 1..21: mol_type = other DNA
ggcagcaagctggacaccccc

SEQ ID NO: 7479 - RNA, 21 nt, synthetic construct
  source 1..21: mol_type = other RNA
tcgattagtcatgtgattaat

SEQ ID NO: 7480 - RNA, 21 nt, synthetic construct
  source 1..21: mol_type = other RNA
aataatcagcggaatccgctg

SEQ ID NO: 7481 - DNA, 21 bp, synthetic construct
  source 1..21: mol_type = other DNA
gtgggcagcctgagaatggac

SEQ ID NO: 7482 - RNA, 21 nt, synthetic construct
  source 1..21: mol_type = other RNA
gtgactactcttggtgcggtt

SEQ ID NO: 7483 - RNA, 21 nt, synthetic construct
  source 1..21: mol_type = other RNA
ctcgtgaacgacgtaacccaa

SEQ ID NO: 7484 - DNA, 21 bp, synthetic construct
  source 1..21: mol_type = other DNA
gggagtctgactcagtctcat

SEQ ID NO: 7485 - RNA, 21 nt, synthetic construct
  source 1..21: mol_type = other RNA
ggcatccaggccaaggccaac

SEQ ID NO: 7486 - RNA, 21 nt, synthetic construct
  source 1..21: mol_type = other RNA
ggaagcttaaacaacgcgtcc

SEQ ID NO: 7487 - DNA, 21 bp, synthetic construct
  source 1..21: mol_type = other DNA
aacagaaacaccagctagaag

SEQ ID NO: 7488 - RNA, 21 nt, synthetic construct
  source 1..21: mol_type = other RNA
tctgaatctaaacaaatcgcc

SEQ ID NO: 7489 - RNA, 21 nt, synthetic construct
  source 1..21: mol_type = other RNA
gacaaaaaccccgcaactggc

SEQ ID NO: 7490 - RNA, 21 nt, synthetic construct
  source 1..21: mol_type = other RNA
gcgaggcgtcttagtgagggg

SEQ ID NO: 7491 - DNA, 21 bp, synthetic construct
  source 1..21: mol_type = other DNA
ggtgtgtctggtagggaacag

SEQ ID NO: 7492 - DNA, 21 bp, synthetic construct
  source 1..21: mol_type = other DNA
gggtatcgggataatcagcat

SEQ ID NO: 7493 - RNA, 21 nt, synthetic construct
  source 1..21: mol_type = other RNA
agcatgtacggcatcaccaac

SEQ ID NO: 7494 - DNA, 21 bp, synthetic construct
  source 1..21: mol_type = other DNA
ggcagacacaacgagacccac

SEQ ID NO: 7495 - DNA, 21 bp, synthetic construct
  source 1..21: mol_type = other DNA
cctacgcggggtgacaatgag

SEQ ID NO: 7496 - DNA, 21 bp, synthetic construct
  source 1..21: mol_type = other DNA
cttgctcgtgaggagcatatg

SEQ ID NO: 7497 - RNA, 21 nt, synthetic construct
  source 1..21: mol_type = other RNA
accagcagcccccccgacagc

SEQ ID NO: 7498 - RNA, 21 nt, synthetic construct
  source 1..21: mol_type = other RNA
atagctgttggcgctaaatct

SEQ ID NO: 7499 - RNA, 21 nt, synthetic construct
  source 1..21: mol_type = other RNA
atgctggccagagtggtgccc

SEQ ID NO: 7500 - RNA, 21 nt, synthetic construct
  source 1..21: mol_type = other RNA
gtggacagaaccaccgacggc

SEQ ID NO: 7501 - DNA, 21 bp, synthetic construct
  source 1..21: mol_type = other DNA
ggtgagtctggtagggatcag

SEQ ID NO: 7502 - DNA, 21 bp, synthetic construct
  source 1..21: mol_type = other DNA
atcattaatcgtgctactact

SEQ ID NO: 7503 - DNA, 21 bp, synthetic construct
  source 1..21: mol_type = other DNA
gaagtgaagagcgacacccag

SEQ ID NO: 7504 - DNA, 21 bp, synthetic construct
  source 1..21: mol_type = other DNA
caaggcctgagcggcaaggtg

SEQ ID NO: 7505 - RNA, 21 nt, synthetic construct
  source 1..21: mol_type = other RNA
ggcttacaacccaacgtctca

SEQ ID NO: 7506 - DNA, 21 bp, synthetic construct
  source 1..21: mol_type = other DNA
gcggatcggactagggaaggg

SEQ ID NO: 7507 - RNA, 21 nt, synthetic construct
  source 1..21: mol_type = other RNA
agcggcgacagcgtgagagcc

SEQ ID NO: 7508 - DNA, 21 bp, synthetic construct
  source 1..21: mol_type = other DNA
gagactgctacgaagagtaat

SEQ ID NO: 7509 - RNA, 21 nt, synthetic construct
  source 1..21: mol_type = other RNA
actatcgaagccccagcaatg

SEQ ID NO: 7510 - DNA, 21 bp, synthetic construct
  source 1..21: mol_type = other DNA
gtgggcagcgtgagaatggaa

SEQ ID NO: 7511 - RNA, 21 nt, synthetic construct
  source 1..21: mol_type = other RNA
ctgggcaccagcgtgggcagc

SEQ ID NO: 7512 - RNA, 21 nt, synthetic construct
  source 1..21: mol_type = other RNA
gccgtactacccatagcctca

SEQ ID NO: 7513 - DNA, 21 bp, synthetic construct
  source 1..21: mol_type = other DNA
ataggggccatgggcggtcag

SEQ ID NO: 7514 - DNA, 21 bp, synthetic construct
  source 1..21: mol_type = other DNA
atgatgaagactgagaagggg

SEQ ID NO: 7515 - DNA, 21 bp, synthetic construct
  source 1..21: mol_type = other DNA
ggcaccatcggcaacggctta

SEQ ID NO: 7516 - DNA, 21 bp, synthetic construct
  source 1..21: mol_type = other DNA
cagacgtctgtgatactaggc

SEQ ID NO: 7517 - DNA, 21 bp, synthetic construct
  source 1..21: mol_type = other DNA
atcggcagaaacaacagcgtg

SEQ ID NO: 7518 - DNA, 21 bp, synthetic construct
  source 1..21: mol_type = other DNA
cacgtggtggccgtgggcctg

SEQ ID NO: 7519 - DNA, 21 bp, synthetic construct
  source 1..21: mol_type = other DNA
agacacgtgcacagaaaggac

SEQ ID NO: 7520 - RNA, 21 nt, synthetic construct
  source 1..21: mol_type = other RNA
ccgattaatcaggttattatg

SEQ ID NO: 7521 - RNA, 21 nt, synthetic construct
  source 1..21: mol_type = other RNA
ttcctgaacggagtagtcctt

SEQ ID NO: 7522 - DNA, 21 bp, synthetic construct
  source 1..21: mol_type = other DNA
tccatcagccacgtcaccaac

SEQ ID NO: 7523 - DNA, 21 bp, synthetic construct
  source 1..21: mol_type = other DNA
ggcataatgagatcccaaaac

SEQ ID NO: 7524 - DNA, 21 bp, synthetic construct
  source 1..21: mol_type = other DNA
caaacaacggggggaaccagt

SEQ ID NO: 7525 - DNA, 21 bp, synthetic construct
  source 1..21: mol_type = other DNA
tatcagcgggctgagtcgcgt

SEQ ID NO: 7526 - RNA, 21 nt, synthetic construct
  source 1..21: mol_type = other RNA
gttaaccacggcggagttcaa

SEQ ID NO: 7527 - DNA, 21 bp, synthetic construct
  source 1..21: mol_type = other DNA
cccggcctgagcggcaaggag

SEQ ID NO: 7528 - DNA, 21 bp, synthetic construct
  source 1..21: mol_type = other DNA
ggcagcaagctggccaccacc

SEQ ID NO: 7529 - DNA, 21 bp, synthetic construct
  source 1..21: mol_type = other DNA
cctacgcggggtgggaatgag

SEQ ID NO: 7530 - DNA, 21 bp, synthetic construct
  source 1..21: mol_type = other DNA
atgattaatcgtgcttctact

SEQ ID NO: 7531 - DNA, 21 bp, synthetic construct
  source 1..21: mol_type = other DNA
ctggtgagcgacatggccaag

SEQ ID NO: 7532 - RNA, 21 nt, synthetic construct
  source 1..21: mol_type = other RNA
ctgtcccaaaaaacttcactg

SEQ ID NO: 7533 - DNA, 21 bp, synthetic construct
  source 1..21: mol_type = other DNA
gcggatactgggattaagttg

SEQ ID NO: 7534 - RNA, 21 nt, synthetic construct
  source 1..21: mol_type = other RNA
cggacctccaacagcgagata

SEQ ID NO: 7535 - DNA, 21 bp, synthetic construct
  source 1..21: mol_type = other DNA
attgggctgggtacgaagtcg

SEQ ID NO: 7536 - DNA, 21 bp, synthetic construct
  source 1..21: mol_type = other DNA
gtgggcagagtgagaatggac

SEQ ID NO: 7537 - DNA, 21 bp, synthetic construct
  source 1..21: mol_type = other DNA
atgatgaagactgagacggcg

SEQ ID NO: 7538 - DNA, 21 bp, synthetic construct
  source 1..21: mol_type = other DNA
tccatcagccccagcagcagc

SEQ ID NO: 7539 - DNA, 21 bp, synthetic construct
  source 1..21: mol_type = other DNA
ccctacaaccaccccaccaga

SEQ ID NO: 7540 - DNA, 21 bp, synthetic construct
  source 1..21: mol_type = other DNA
ggtgtgtctggtagggatcat

SEQ ID NO: 7541 - RNA, 21 nt, synthetic construct
  source 1..21: mol_type = other RNA
tatgttaagagttctgagact

SEQ ID NO: 7542 - DNA, 21 bp, synthetic construct
  source 1..21: mol_type = other DNA
ggctccggcatggccgtgaag

SEQ ID NO: 7543 - DNA, 21 bp, synthetic construct
  source 1..21: mol_type = other DNA
cccaacctgcatcagagccag

SEQ ID NO: 7544 - RNA, 21 nt, synthetic construct
  source 1..21: mol_type = other RNA
agcggcagcaacaacagcgtg

SEQ ID NO: 7545 - DNA, 21 bp, synthetic construct
  source 1..21: mol_type = other DNA
cagaacagaggcaccgagatg

SEQ ID NO: 7546 - RNA, 21 nt, synthetic construct
  source 1..21: mol_type = other RNA
agccaaggagccgaaagtcgc

SEQ ID NO: 7547 - RNA, 21 nt, synthetic construct
  source 1..21: mol_type = other RNA
accatccagcaagacaacatg

SEQ ID NO: 7548 - DNA, 21 bp, synthetic construct
  source 1..21: mol_type = other DNA
gttgctcgtgagcagcatatg

SEQ ID NO: 7549 - DNA, 21 bp, synthetic construct
  source 1..21: mol_type = other DNA
cccggcatgagcggcaaggtg

SEQ ID NO: 7550 - RNA, 21 nt, synthetic construct
  source 1..21: mol_type = other RNA
tacttcgcccccgagatgagc

SEQ ID NO: 7551 - DNA, 21 bp, synthetic construct
  source 1..21: mol_type = other DNA
agaagcgacgtggagagcgac

SEQ ID NO: 7552 - DNA, 21 bp, synthetic construct
  source 1..21: mol_type = other DNA
cctacgcggggtgagaataag

SEQ ID NO: 7553 - DNA, 21 bp, synthetic construct
  source 1..21: mol_type = other DNA
aaagacatcgacggcatcgtg

SEQ ID NO: 7554 - DNA, 21 bp, synthetic construct
  source 1..21: mol_type = other DNA
caaacaacgggggatccagtc

SEQ ID NO: 7555 - RNA, 21 nt, synthetic construct
  source 1..21: mol_type = other RNA
gagaccatcggcaacggctac

SEQ ID NO: 7556 - DNA, 21 bp, synthetic construct
  source 1..21: mol_type = other DNA
cagacgactagagatactagg

SEQ ID NO: 7557 - DNA, 21 bp, synthetic construct
  source 1..21: mol_type = other DNA
agaggcagaaacaacagcgtg

SEQ ID NO: 7558 - DNA, 21 bp, synthetic construct
  source 1..21: mol_type = other DNA
gcgatgcgtcttagtgaggtg

SEQ ID NO: 7559 - DNA, 21 bp, synthetic construct
  source 1..21: mol_type = other DNA
gcggtgcgtcttagtgagggg

SEQ ID NO: 7560 - DNA, 21 bp, synthetic construct
  source 1..21: mol_type = other DNA
accatcagacccagcagcagc

SEQ ID NO: 7561 - DNA, 21 bp, synthetic construct
  source 1..21: mol_type = other DNA
aaaagttccgttgtcaaatct

SEQ ID NO: 7562 - DNA, 21 bp, synthetic construct
  source 1..21: mol_type = other DNA
aacagcagcccccccgtggtg

SEQ ID NO: 7563 - DNA, 21 bp, synthetic construct
  source 1..21: mol_type = other DNA
atcgggcaaggagtgagcgag

SEQ ID NO: 7564 - DNA, 21 bp, synthetic construct
  source 1..21: mol_type = other DNA
gatgctcgtgaggagcataag

SEQ ID NO: 7565 - RNA, 21 nt, synthetic construct
  source 1..21: mol_type = other RNA
atgctggcccacgtggtgacc

SEQ ID NO: 7566 - DNA, 21 bp, synthetic construct
  source 1..21: mol_type = other DNA
agcggcagaaacaacagagtg

SEQ ID NO: 7567 - DNA, 21 bp, synthetic construct
  source 1..21: mol_type = other DNA
gcgatgcctcttagtgagggg

SEQ ID NO: 7568 - RNA, 21 nt, synthetic construct
  source 1..21: mol_type = other RNA
gagagtgctacgaagagtatt

SEQ ID NO: 7569 - DNA, 21 bp, synthetic construct
  source 1..21: mol_type = other DNA
aacagttccgttgtcaaatat

SEQ ID NO: 7570 - RNA, 21 nt, synthetic construct
  source 1..21: mol_type = other RNA
agtagggatgatactatttct

SEQ ID NO: 7571 - DNA, 21 bp, synthetic construct
  source 1..21: mol_type = other DNA
accatcagccacgtcaccaaa

SEQ ID NO: 7572 - RNA, 21 nt, synthetic construct
  source 1..21: mol_type = other RNA
ctgagtaaggttgatagtgtg

SEQ ID NO: 7573 - DNA, 21 bp, synthetic construct
  source 1..21: mol_type = other DNA
ataggggccaagggcggtctg

SEQ ID NO: 7574 - RNA, 21 nt, synthetic construct
  source 1..21: mol_type = other RNA
ggctacgtgctgaaatcacca

SEQ ID NO: 7575 - DNA, 21 bp, synthetic construct
  source 1..21: mol_type = other DNA
cctacgcggggtgagattgag

SEQ ID NO: 7576 - DNA, 21 bp, synthetic construct
  source 1..21: mol_type = other DNA
gtcaaaatatacggcgcccag

SEQ ID NO: 7577 - DNA, 21 bp, synthetic construct
  source 1..21: mol_type = other DNA
gggagtcagactcagactcat

SEQ ID NO: 7578 - DNA, 21 bp, synthetic construct
  source 1..21: mol_type = other DNA
atgaagaagactgagacgggg

SEQ ID NO: 7579 - RNA, 21 nt, synthetic construct
  source 1..21: mol_type = other RNA
gatgtgaagaatcctgggaag

SEQ ID NO: 7580 - DNA, 21 bp, synthetic construct
  source 1..21: mol_type = other DNA
gcgatgcgtcttagagacggg

SEQ ID NO: 7581 - RNA, 21 nt, synthetic construct
  source 1..21: mol_type = other RNA
gtgcgggcacccgacacacac

SEQ ID NO: 7582 - DNA, 21 bp, synthetic construct
  source 1..21: mol_type = other DNA
gatgctcgtgaggagcaaatg

SEQ ID NO: 7583 - DNA, 21 bp, synthetic construct
  source 1..21: mol_type = other DNA
attcgggtgggtacgaagtcg

SEQ ID NO: 7584 - DNA, 21 bp, synthetic construct
  source 1..21: mol_type = other DNA
atcagaaacaccagcgagaag

SEQ ID NO: 7585 - DNA, 21 bp, synthetic construct
  source 1..21: mol_type = other DNA
accagcagcccccccttgtgg

SEQ ID NO: 7586 - RNA, 21 nt, synthetic construct
  source 1..21: mol_type = other RNA
ggcctgaccgtgtacagccac

SEQ ID NO: 7587 - RNA, 21 nt, synthetic construct
  source 1..21: mol_type = other RNA
cagatcagagccatggagaag

SEQ ID NO: 7588 - RNA, 21 nt, synthetic construct
  source 1..21: mol_type = other RNA
accatccacctggacatcatg

SEQ ID NO: 7589 - RNA, 21 nt, synthetic construct
  source 1..21: mol_type = other RNA
tctaagagtaatgagacgatt

SEQ ID NO: 7590 - DNA, 21 bp, synthetic construct
  source 1..21: mol_type = other DNA
ccgaataatcttcaaagttct

SEQ ID NO: 7591 - DNA, 21 bp, synthetic construct
  source 1..21: mol_type = other DNA
cctacgcggggtcagaatgag

SEQ ID NO: 7592 - DNA, 21 bp, synthetic construct
  source 1..21: mol_type = other DNA
aatggtaagggtgtttctttt

SEQ ID NO: 7593 - DNA, 21 bp, synthetic construct
  source 1..21: mol_type = other DNA
gggtatggggataatcagcaa

SEQ ID NO: 7594 - DNA, 21 bp, synthetic construct
  source 1..21: mol_type = other DNA
aacacaaacaccagcgagaag

SEQ ID NO: 7595 - RNA, 21 nt, synthetic construct
  source 1..21: mol_type = other RNA
cagcagagagtgagcagcagc

SEQ ID NO: 7596 - RNA, 21 nt, synthetic construct
  source 1..21: mol_type = other RNA
aaatggaccgtgaaccacgaa

SEQ ID NO: 7597 - DNA, 21 bp, synthetic construct
  source 1..21: mol_type = other DNA
ccttatgatagtcctacgaga

SEQ ID NO: 7598 - DNA, 21 bp, synthetic construct
  source 1..21: mol_type = other DNA
cctacgcgggttgagaatgag

SEQ ID NO: 7599 - DNA, 21 bp, synthetic construct
  source 1..21: mol_type = other DNA
aagacgatcggtaacggcttc

SEQ ID NO: 7600 - RNA, 21 nt, synthetic construct
  source 1..21: mol_type = other RNA
ttggcgaatcatactgagatt

SEQ ID NO: 7601 - DNA, 21 bp, synthetic construct
  source 1..21: mol_type = other DNA
agcggcagaaaaaacagcgtg

SEQ ID NO: 7602 - RNA, 21 nt, synthetic construct
  source 1..21: mol_type = other RNA
ggcaccctgcccaacatggcc

SEQ ID NO: 7603 - RNA, 21 nt, synthetic construct
  source 1..21: mol_type = other RNA
aggaaggatgtgatgaatgtt

SEQ ID NO: 7604 - DNA, 21 bp, synthetic construct
  source 1..21: mol_type = other DNA
cctacgcggtgtgagaatgag

SEQ ID NO: 7605 - DNA, 21 bp, synthetic construct
  source 1..21: mol_type = other DNA
aagattaatcgtgctactact

SEQ ID NO: 7606 - RNA, 21 nt, synthetic construct
  source 1..21: mol_type = other RNA
acactgcctaacaactctgaa

SEQ ID NO: 7607 - DNA, 21 bp, synthetic construct
  source 1..21: mol_type = other DNA
gggtatggggaaaatcagcat

SEQ ID NO: 7608 - DNA, 21 bp, synthetic construct
  source 1..21: mol_type = other DNA
cctaagtcggagactctgttg

SEQ ID NO: 7609 - RNA, 21 nt, synthetic construct
  source 1..21: mol_type = other RNA
ggggtggataatgctgatcgg

SEQ ID NO: 7610 - DNA, 21 bp, synthetic construct
  source 1..21: mol_type = other DNA
ggatacgaagacaaccaacac

SEQ ID NO: 7611 - DNA, 21 bp, synthetic construct
  source 1..21: mol_type = other DNA
gcgatgcgtcatagagagggg

SEQ ID NO: 7612 - DNA, 21 bp, synthetic construct
  source 1..21: mol_type = other DNA
ggcaacggcatggccgtgaag

SEQ ID NO: 7613 - DNA, 21 bp, synthetic construct
  source 1..21: mol_type = other DNA
ggctccatcggcaacggcttc

SEQ ID NO: 7614 - DNA, 21 bp, synthetic construct
  source 1..21: mol_type = other DNA
ggcaccggcaaggccgtgaag

SEQ ID NO: 7615 - DNA, 21 bp, synthetic construct
  source 1..21: mol_type = other DNA
gcccggaacgttacagaacgg

SEQ ID NO: 7616 - DNA, 21 bp, synthetic construct
  source 1..21: mol_type = other DNA
tatcagggggctgagacgcgt

SEQ ID NO: 7617 - DNA, 21 bp, synthetic construct
  source 1..21: mol_type = other DNA
ggtgtgactggtagggatcag

SEQ ID NO: 7618 - DNA, 21 bp, synthetic construct
  source 1..21: mol_type = other DNA
agagagaagactgacgggctg

SEQ ID NO: 7619 - DNA, 21 bp, synthetic construct
  source 1..21: mol_type = other DNA
gaagctcgtgaggagcatatg

SEQ ID NO: 7620 - DNA, 21 bp, synthetic construct
  source 1..21: mol_type = other DNA
ccttatgatagacctacgagt

SEQ ID NO: 7621 - DNA, 21 bp, synthetic construct
  source 1..21: mol_type = other DNA
ggcagacaaaacgagaccccc

SEQ ID NO: 7622 - DNA, 21 bp, synthetic construct
  source 1..21: mol_type = other DNA
aacagaaacaccatcgagaag

SEQ ID NO: 7623 - DNA, 21 bp, synthetic construct
  source 1..21: mol_type = other DNA
cctacgcggggtgaggatgag

SEQ ID NO: 7624 - DNA, 21 bp, synthetic construct
  source 1..21: mol_type = other DNA
cctacgcggggtgagaaaatg

SEQ ID NO: 7625 - RNA, 21 nt, synthetic construct
  source 1..21: mol_type = other RNA
catgataagagttctgagaat

SEQ ID NO: 7626 - DNA, 21 bp, synthetic construct
  source 1..21: mol_type = other DNA
ttggtcaaagacgtaagccat

SEQ ID NO: 7627 - DNA, 21 bp, synthetic construct
  source 1..21: mol_type = other DNA
aatggtcaggctgtttctttt

SEQ ID NO: 7628 - DNA, 21 bp, synthetic construct
  source 1..21: mol_type = other DNA
accatcagccccagcagaagc

SEQ ID NO: 7629 - DNA, 21 bp, synthetic construct
  source 1..21: mol_type = other DNA
gcccggaacgatacagaaggg

SEQ ID NO: 7630 - DNA, 21 bp, synthetic construct
  source 1..21: mol_type = other DNA
tatcagggggctgactcgcgt

SEQ ID NO: 7631 - DNA, 21 bp, synthetic construct
  source 1..21: mol_type = other DNA
gccagcaccggcatcaagatg

SEQ ID NO: 7632 - DNA, 21 bp, synthetic construct
  source 1..21: mol_type = other DNA
gcaggctaagaatcagcaata

SEQ ID NO: 7633 - DNA, 21 bp, synthetic construct
  source 1..21: mol_type = other DNA
accatcagacacgtgaacatg

SEQ ID NO: 7634 - DNA, 21 bp, synthetic construct
  source 1..21: mol_type = other DNA
gggacgttgcctaataaggat

SEQ ID NO: 7635 - DNA, 21 bp, synthetic construct
  source 1..21: mol_type = other DNA
gtcttccaacaaggaaacgtt

SEQ ID NO: 7636 - RNA, 21 nt, synthetic construct
  source 1..21: mol_type = other RNA
cacctggtggccgtgggcgtg

SEQ ID NO: 7637 - DNA, 21 bp, synthetic construct
  source 1..21: mol_type = other DNA
gacgagaagagcgacacccag

SEQ ID NO: 7638 - RNA, 21 nt, synthetic construct
  source 1..21: mol_type = other RNA
aagctgggccacaactacggc

SEQ ID NO: 7639 - RNA, 21 nt, synthetic construct
  source 1..21: mol_type = other RNA
accggcctgagcggcaaggtg

SEQ ID NO: 7640 - DNA, 21 bp, synthetic construct
  source 1..21: mol_type = other DNA
gcgaagcgtcttagagagggg

SEQ ID NO: 7641 - RNA, 21 nt, synthetic construct
  source 1..21: mol_type = other RNA
gtactggccccagggacccac

SEQ ID NO: 7642 - DNA, 21 bp, synthetic construct
  source 1..21: mol_type = other DNA
ggggtggttaatgatgatcgg

SEQ ID NO: 7643 - DNA, 21 bp, synthetic construct
  source 1..21: mol_type = other DNA
gacctgaagagcgacacccag

SEQ ID NO: 7644 - DNA, 21 bp, synthetic construct
  source 1..21: mol_type = other DNA
accatcagccacgtctccaac

SEQ ID NO: 7645 - RNA, 21 nt, synthetic construct
  source 1..21: mol_type = other RNA
gcccccaccggcatcaagagc

SEQ ID NO: 7646 - DNA, 21 bp, synthetic construct
  source 1..21: mol_type = other DNA
accatcagccacagcagcagc

SEQ ID NO: 7647 - DNA, 21 bp, synthetic construct
  source 1..21: mol_type = other DNA
gccagcaccggcatcaagcag

SEQ ID NO: 7648 - DNA, 21 bp, synthetic construct
  source 1..21: mol_type = other DNA
caaacaacggggggaaccaga

SEQ ID NO: 7649 - DNA, 21 bp, synthetic construct
  source 1..21: mol_type = other DNA
caaacaacggggggatccggt

SEQ ID NO: 7650 - DNA, 21 bp, synthetic construct
  source 1..21: mol_type = other DNA
gacgtggagaaacccggcaag

SEQ ID NO: 7651 - DNA, 21 bp, synthetic construct
  source 1..21: mol_type = other DNA
ccgatgcgtcttagtgagggg

SEQ ID NO: 7652 - DNA, 21 bp, synthetic construct
  source 1..21: mol_type = other DNA
agaagcgacgaggtgagcgac

SEQ ID NO: 7653 - DNA, 21 bp, synthetic construct
  source 1..21: mol_type = other DNA
gtcttccatcaaggacacgtt

SEQ ID NO: 7654 - RNA, 21 nt, synthetic construct
  source 1..21: mol_type = other RNA
cccgacgtgagaatcagcgtg

SEQ ID NO: 7655 - RNA, 21 nt, synthetic construct
  source 1..21: mol_type = other RNA
ggcgtgaaccagaacatgaga

SEQ ID NO: 7656 - DNA, 21 bp, synthetic construct
  source 1..21: mol_type = other DNA
gacttccaacaaggacacgtt

SEQ ID NO: 7657 - DNA, 21 bp, synthetic construct
  source 1..21: mol_type = other DNA
aagatcagaggcaccgagatg

SEQ ID NO: 7658 - RNA, 21 nt, synthetic construct
  source 1..21: mol_type = other RNA
acgattaatcagcttattatg

SEQ ID NO: 7659 - RNA, 21 nt, synthetic construct
  source 1..21: mol_type = other RNA
gccaacatagaatgcgcagtc

SEQ ID NO: 7660 - DNA, 21 bp, synthetic construct
  source 1..21: mol_type = other DNA
gcgatgggtcttagtgagggg

SEQ ID NO: 7661 - DNA, 21 bp, synthetic construct
  source 1..21: mol_type = other DNA
gggtatggggataatcatcat

SEQ ID NO: 7662 - RNA, 21 nt, synthetic construct
  source 1..21: mol_type = other RNA
gcgaggaatctgaatgagggt

SEQ ID NO: 7663 - DNA, 21 bp, synthetic construct
  source 1..21: mol_type = other DNA
ggcataatgagaacccaaaaa

SEQ ID NO: 7664 - DNA, 21 bp, synthetic construct
  source 1..21: mol_type = other DNA
atcggcaaggagtgagcgtgc

SEQ ID NO: 7665 - DNA, 21 bp, synthetic construct
  source 1..21: mol_type = other DNA
atcggcagaatcgtgaaagag

SEQ ID NO: 7666 - RNA, 21 nt, synthetic construct
  source 1..21: mol_type = other RNA
gtaacaataggcaacggcctc

SEQ ID NO: 7667 - RNA, 21 nt, synthetic construct
  source 1..21: mol_type = other RNA
atgaacggcgtgagcccccac

SEQ ID NO: 7668 - RNA, 21 nt, synthetic construct
  source 1..21: mol_type = other RNA
aaaataaacaccttcaaagtg

SEQ ID NO: 7669 - RNA, 21 nt, synthetic construct
  source 1..21: mol_type = other RNA
caagttaagagttctgagact

SEQ ID NO: 7670 - RNA, 21 nt, synthetic construct
  source 1..21: mol_type = other RNA
caattgtcatcaacctctaca

SEQ ID NO: 7671 - DNA, 21 bp, synthetic construct
  source 1..21: mol_type = other DNA
accatcagcaccagcagcagc

SEQ ID NO: 7672 - DNA, 21 bp, synthetic construct
  source 1..21: mol_type = other DNA
gggatgcgtcttagtgagggg

SEQ ID NO: 7673 - DNA, 21 bp, synthetic construct
  source 1..21: mol_type = other DNA
gtcaaattatacggcgccctg

SEQ ID NO: 7674 - DNA, 21 bp, synthetic construct
  source 1..21: mol_type = other DNA
aatggtcagcgtgtttctttt

SEQ ID NO: 7675 - DNA, 21 bp, synthetic construct
  source 1..21: mol_type = other DNA
gttgctcgtgaggagcaaaag

SEQ ID NO: 7676 - RNA, 21 nt, synthetic construct
  source 1..21: mol_type = other RNA
cttgtggatcataattctgtg

SEQ ID NO: 7677 - DNA, 21 bp, synthetic construct
  source 1..21: mol_type = other DNA
gttcctcgtgaggagcatatg

SEQ ID NO: 7678 - DNA, 21 bp, synthetic construct
  source 1..21: mol_type = other DNA
aatcgtcagggtgtttctttt

SEQ ID NO: 7679 - DNA, 21 bp, synthetic construct
  source 1..21: mol_type = other DNA
atcggcagaatcctgaacgag

SEQ ID NO: 7680 - DNA, 21 bp, synthetic construct
  source 1..21: mol_type = other DNA
gtcttccaacaaggacacctt

SEQ ID NO: 7681 - RNA, 21 nt, synthetic construct
  source 1..21: mol_type = other RNA
cgtgatagggggaattcggat

SEQ ID NO: 7682 - RNA, 21 nt, synthetic construct
  source 1..21: mol_type = other RNA
gaagtggagaatcctgggaag

SEQ ID NO: 7683 - DNA, 21 bp, synthetic construct
  source 1..21: mol_type = other DNA
gccagcaacggcatcaagctg

SEQ ID NO: 7684 - DNA, 21 bp, synthetic construct
  source 1..21: mol_type = other DNA
gcggctactgggaataagttg

SEQ ID NO: 7685 - RNA, 21 nt, synthetic construct
  source 1..21: mol_type = other RNA
atgcatcatgcgtctaaggag

SEQ ID NO: 7686 - DNA, 21 bp, synthetic construct
  source 1..21: mol_type = other DNA
aacagttccgttgtcaaaact

SEQ ID NO: 7687 - DNA, 21 bp, synthetic construct
  source 1..21: mol_type = other DNA
caaaaaaaaccgatcgaacgg

SEQ ID NO: 7688 - DNA, 21 bp, synthetic construct
  source 1..21: mol_type = other DNA
ggctccatgcaaacacataac

SEQ ID NO: 7689 - RNA, 21 nt, synthetic construct
  source 1..21: mol_type = other RNA
aatgttgtgtctagtgctttg

SEQ ID NO: 7690 - DNA, 21 bp, synthetic construct
  source 1..21: mol_type = other DNA
ccttatgaaagtcctacgagt

SEQ ID NO: 7691 - DNA, 21 bp, synthetic construct
  source 1..21: mol_type = other DNA
aacagaaacaccagccagaag

SEQ ID NO: 7692 - RNA, 21 nt, synthetic construct
  source 1..21: mol_type = other RNA
ggcagaaagctggccaccccc

SEQ ID NO: 7693 - DNA, 21 bp, synthetic construct
  source 1..21: mol_type = other DNA
cggtatggggataatcagcat

SEQ ID NO: 7694 - DNA, 21 bp, synthetic construct
  source 1..21: mol_type = other DNA
ggctccatgcaagcacaaaac

SEQ ID NO: 7695 - RNA, 21 nt, synthetic construct
  source 1..21: mol_type = other RNA
ggatacgtggtgaaatccagt

SEQ ID NO: 7696 - DNA, 21 bp, synthetic construct
  source 1..21: mol_type = other DNA
tctctgggtaacatcaaatcg

SEQ ID NO: 7697 - DNA, 21 bp, synthetic construct
  source 1..21: mol_type = other DNA
caaacaaaggggggatccagt

SEQ ID NO: 7698 - RNA, 21 nt, synthetic construct
  source 1..21: mol_type = other RNA
accatcgagagaaccgccaag

SEQ ID NO: 7699 - DNA, 21 bp, synthetic construct
  source 1..21: mol_type = other DNA
ctcaaaatatacggcgccctg

SEQ ID NO: 7700 - DNA, 21 bp, synthetic construct
  source 1..21: mol_type = other DNA
atcgggcaaggagagagcgtg

SEQ ID NO: 7701 - DNA, 21 bp, synthetic construct
  source 1..21: mol_type = other DNA
gggtatggggataaacagcat

SEQ ID NO: 7702 - DNA, 21 bp, synthetic construct
  source 1..21: mol_type = other DNA
cacgtggtggccctgggcgtg

SEQ ID NO: 7703 - DNA, 21 bp, synthetic construct
  source 1..21: mol_type = other DNA
accatcagacagctgaacatg

SEQ ID NO: 7704 - DNA, 21 bp, synthetic construct
  source 1..21: mol_type = other DNA
gggacgttgactaataaggct

SEQ ID NO: 7705 - DNA, 21 bp, synthetic construct
  source 1..21: mol_type = other DNA
accatcagccacgtcaccacc

SEQ ID NO: 7706 - DNA, 21 bp, synthetic construct
  source 1..21: mol_type = other DNA
attggtcagggtgtttctttt

SEQ ID NO: 7707 - DNA, 21 bp, synthetic construct
  source 1..21: mol_type = other DNA
ccgaaaaatcttcatagttct

SEQ ID NO: 7708 - DNA, 21 bp, synthetic construct
  source 1..21: mol_type = other DNA
gaccggaacgttacagaaggg

SEQ ID NO: 7709 - RNA, 21 nt, synthetic construct
  source 1..21: mol_type = other RNA
agcgacgccgcaagtaaagtc

SEQ ID NO: 7710 - DNA, 21 bp, synthetic construct
  source 1..21: mol_type = other DNA
gtcttccaacaaggacacgat

SEQ ID NO: 7711 - RNA, 21 nt, synthetic construct
  source 1..21: mol_type = other RNA
gccctgagcgtgggccagaag

SEQ ID NO: 7712 - DNA, 21 bp, synthetic construct
  source 1..21: mol_type = other DNA
gtcttccaaaaaggacacgtt

SEQ ID NO: 7713 - RNA, 21 nt, synthetic construct
  source 1..21: mol_type = other RNA
gacaaaaacgcagcaaccggc

SEQ ID NO: 7714 - DNA, 21 bp, synthetic construct
  source 1..21: mol_type = other DNA
aatggtcagggtctttctttt

SEQ ID NO: 7715 - RNA, 21 nt, synthetic construct
  source 1..21: mol_type = other RNA
ctggacacccagcacctgatc

SEQ ID NO: 7716 - DNA, 21 bp, synthetic construct
  source 1..21: mol_type = other DNA
gtcaccatcggcaacggcttc

SEQ ID NO: 7717 - DNA, 21 bp, synthetic construct
  source 1..21: mol_type = other DNA
atagggtccatgggcggtctg

SEQ ID NO: 7718 - DNA, 21 bp, synthetic construct
  source 1..21: mol_type = other DNA
tttcagggggctgagtcgcgt

SEQ ID NO: 7719 - DNA, 21 bp, synthetic construct
  source 1..21: mol_type = other DNA
gcgaagcgtcatagtgagggg

SEQ ID NO: 7720 - DNA, 21 bp, synthetic construct
  source 1..21: mol_type = other DNA
gtgggcagcgtgagaaaggac

SEQ ID NO: 7721 - DNA, 21 bp, synthetic construct
  source 1..21: mol_type = other DNA
gcgatgagtcttagagagggg

SEQ ID NO: 7722 - DNA, 21 bp, synthetic construct
  source 1..21: mol_type = other DNA
attggggtgggtacgaactcg

SEQ ID NO: 7723 - DNA, 21 bp, synthetic construct
  source 1..21: mol_type = other DNA
gttgctcttgaggagcatatg

SEQ ID NO: 7724 - DNA, 21 bp, synthetic construct
  source 1..21: mol_type = other DNA
ggcagacacaacgagcccccc

SEQ ID NO: 7725 - DNA, 21 bp, synthetic construct
  source 1..21: mol_type = other DNA
atcacgatcggtaacggcttc

SEQ ID NO: 7726 - RNA, 21 nt, synthetic construct
  source 1..21: mol_type = other RNA
atggagcatcgtaatgatggg

SEQ ID NO: 7727 - DNA, 21 bp, synthetic construct
  source 1..21: mol_type = other DNA
ggcatgcaagacgtactcatc

SEQ ID NO: 7728 - RNA, 21 nt, synthetic construct
  source 1..21: mol_type = other RNA
catgtggagaatcctgggaag

SEQ ID NO: 7729 - DNA, 21 bp, synthetic construct
  source 1..21: mol_type = other DNA
caaacaacggggggatacagt

SEQ ID NO: 7730 - DNA, 21 bp, synthetic construct
  source 1..21: mol_type = other DNA
gatcatgcgccgggtacgcat

SEQ ID NO: 7731 - DNA, 21 bp, synthetic construct
  source 1..21: mol_type = other DNA
aacagttacgttgtcaaatct

SEQ ID NO: 7732 - DNA, 21 bp, synthetic construct
  source 1..21: mol_type = other DNA
ggcaccatgcaaacacaaaac

SEQ ID NO: 7733 - RNA, 21 nt, synthetic construct
  source 1..21: mol_type = other RNA
ggtcttcgaggcgaagacatg

SEQ ID NO: 7734 - DNA, 21 bp, synthetic construct
  source 1..21: mol_type = other DNA
ataggggacatgggcggtctg

SEQ ID NO: 7735 - DNA, 21 bp, synthetic construct
  source 1..21: mol_type = other DNA
cctacgcggggtgagaatggg

SEQ ID NO: 7736 - DNA, 21 bp, synthetic construct
  source 1..21: mol_type = other DNA
gacgtgaacagcgacacccag

SEQ ID NO: 7737 - DNA, 21 bp, synthetic construct
  source 1..21: mol_type = other DNA
gacgtgaagagcgacacccac

SEQ ID NO: 7738 - DNA, 21 bp, synthetic construct
  source 1..21: mol_type = other DNA
gcgatgcgtctttgtgagggg

SEQ ID NO: 7739 - DNA, 21 bp, synthetic construct
  source 1..21: mol_type = other DNA
cctacgcggggtgagaatatc

SEQ ID NO: 7740 - RNA, 21 nt, synthetic construct
  source 1..21: mol_type = other RNA
actgtgtcacacgtaatcaac

SEQ ID NO: 7741 - DNA, 21 bp, synthetic construct
  source 1..21: mol_type = other DNA
ggcataatgagcacccaaaac

SEQ ID NO: 7742 - DNA, 21 bp, synthetic construct
  source 1..21: mol_type = other DNA
accatcagacaggtgaacata

SEQ ID NO: 7743 - RNA, 21 nt, synthetic construct
  source 1..21: mol_type = other RNA
agcctgctgcccggctaccac

SEQ ID NO: 7744 - RNA, 21 nt, synthetic construct
  source 1..21: mol_type = other RNA
caggtgggcagcgccaccgtg

SEQ ID NO: 7745 - DNA, 21 bp, synthetic construct
  source 1..21: mol_type = other DNA
attggggtgggtacgaagacg

SEQ ID NO: 7746 - DNA, 21 bp, synthetic construct
  source 1..21: mol_type = other DNA
gttgctcctgaggagcatatg

SEQ ID NO: 7747 - RNA, 21 nt, synthetic construct
  source 1..21: mol_type = other RNA
gactacccctctaggggaatc

SEQ ID NO: 7748 - DNA, 21 bp, synthetic construct
  source 1..21: mol_type = other DNA
aatcagggggctgagtcgcgt

SEQ ID NO: 7749 - RNA, 21 nt, synthetic construct
  source 1..21: mol_type = other RNA
ggtattaatttggcgactcct

SEQ ID NO: 7750 - RNA, 21 nt, synthetic construct
  source 1..21: mol_type = other RNA
gttgttttgcctattgcgtcg

SEQ ID NO: 7751 - RNA, 21 nt, synthetic construct
  source 1..21: mol_type = other RNA
gagatttataatacggcgctt

SEQ ID NO: 7752 - RNA, 21 nt, synthetic construct
  source 1..21: mol_type = other RNA
gagatctacaacaccgtgcac

SEQ ID NO: 7753 - DNA, 21 bp, synthetic construct
  source 1..21: mol_type = other DNA
ccctacaaccacaccaccagc

SEQ ID NO: 7754 - DNA, 21 bp, synthetic construct
  source 1..21: mol_type = other DNA
gttaacgactccgcagcaaac

SEQ ID NO: 7755 - DNA, 21 bp, synthetic construct
  source 1..21: mol_type = other DNA
gcccggaacgttacagaagcg

SEQ ID NO: 7756 - DNA, 21 bp, synthetic construct
  source 1..21: mol_type = other DNA
agagagaagtctgaggggctg

SEQ ID NO: 7757 - DNA, 21 bp, synthetic construct
  source 1..21: mol_type = other DNA
tctctgggtaacatccaaacg

SEQ ID NO: 7758 - DNA, 21 bp, synthetic construct
  source 1..21: mol_type = other DNA
aaaggggccatgggcggtctg

SEQ ID NO: 7759 - RNA, 21 nt, synthetic construct
  source 1..21: mol_type = other RNA
gtgctgagacccaacatcgtg

SEQ ID NO: 7760 - DNA, 21 bp, synthetic construct
  source 1..21: mol_type = other DNA
catacaacggggggatccagt

SEQ ID NO: 7761 - DNA, 21 bp, synthetic construct
  source 1..21: mol_type = other DNA
caaaaaacggggggatccagt

SEQ ID NO: 7762 - RNA, 21 nt, synthetic construct
  source 1..21: mol_type = other RNA
agaaacgcccccaacatcgac

SEQ ID NO: 7763 - DNA, 21 bp, synthetic construct
  source 1..21: mol_type = other DNA
ggcggactgcccatagattca

SEQ ID NO: 7764 - DNA, 21 bp, synthetic construct
  source 1..21: mol_type = other DNA
gcggcttctgggattaagttg

SEQ ID NO: 7765 - DNA, 21 bp, synthetic construct
  source 1..21: mol_type = other DNA
aacagaaccaccagcgagaag

SEQ ID NO: 7766 - DNA, 21 bp, synthetic construct
  source 1..21: mol_type = other DNA
cacgtggtggccgtgggcgag

SEQ ID NO: 7767 - DNA, 21 bp, synthetic construct
  source 1..21: mol_type = other DNA
aagagagagcacgacggctac

SEQ ID NO: 7768 - DNA, 21 bp, synthetic construct
  source 1..21: mol_type = other DNA
aaagccatcgaaggcatcgtg

SEQ ID NO: 7769 - RNA, 21 nt, synthetic construct
  source 1..21: mol_type = other RNA
gggtatgaggaaaatcagcaa

SEQ ID NO: 7770 - DNA, 21 bp, synthetic construct
  source 1..21: mol_type = other DNA
agcggcagaaacaaaagcgtg

SEQ ID NO: 7771 - DNA, 21 bp, synthetic construct
  source 1..21: mol_type = other DNA
gcccggaacgttaaagaaggg

SEQ ID NO: 7772 - DNA, 21 bp, synthetic construct
  source 1..21: mol_type = other DNA
cacaagcccgagaccgccctg

SEQ ID NO: 7773 - DNA, 21 bp, synthetic construct
  source 1..21: mol_type = other DNA
aacagttccgatgtcaaatct

SEQ ID NO: 7774 - RNA, 21 nt, synthetic construct
  source 1..21: mol_type = other RNA
agaagcctgaacaacgccacc

SEQ ID NO: 7775 - DNA, 21 bp, synthetic construct
  source 1..21: mol_type = other DNA
agagagaagaatgaggggctg

SEQ ID NO: 7776 - DNA, 21 bp, synthetic construct
  source 1..21: mol_type = other DNA
cgtacgcggggtgagaatgag

SEQ ID NO: 7777 - DNA, 21 bp, synthetic construct
  source 1..21: mol_type = other DNA
ggcaccctgcacaacaaggcc

SEQ ID NO: 7778 - DNA, 21 bp, synthetic construct
  source 1..21: mol_type = other DNA
gagactgatacgaagagtatt

SEQ ID NO: 7779 - DNA, 21 bp, synthetic construct
  source 1..21: mol_type = other DNA
aagctggagttcaacagagtg

SEQ ID NO: 7780 - DNA, 21 bp, synthetic construct
  source 1..21: mol_type = other DNA
ctgggcagcgtgagaatggac

SEQ ID NO: 7781 - DNA, 21 bp, synthetic construct
  source 1..21: mol_type = other DNA
gttgctcgtgaggagcatttg

SEQ ID NO: 7782 - DNA, 21 bp, synthetic construct
  source 1..21: mol_type = other DNA
gtcaaaatatactgcgccctg

SEQ ID NO: 7783 - DNA, 21 bp, synthetic construct
  source 1..21: mol_type = other DNA
aaagccatcgacggcatcgag

SEQ ID NO: 7784 - DNA, 21 bp, synthetic construct
  source 1..21: mol_type = other DNA
cctacgcggggtaagaatgag

SEQ ID NO: 7785 - DNA, 21 bp, synthetic construct
  source 1..21: mol_type = other DNA
agctcccaaaaaacaagactg

SEQ ID NO: 7786 - RNA, 21 nt, synthetic construct
  source 1..21: mol_type = other RNA
ggcaaggccatcgtggagaac

SEQ ID NO: 7787 - DNA, 21 bp, synthetic construct
  source 1..21: mol_type = other DNA
accatcagcaacgtcaccaac

SEQ ID NO: 7788 - DNA, 21 bp, synthetic construct
  source 1..21: mol_type = other DNA
gtcttcaaacaaggacacgtt

SEQ ID NO: 7789 - DNA, 21 bp, synthetic construct
  source 1..21: mol_type = other DNA
gcgatgcgtcttagagagcgg

SEQ ID NO: 7790 - DNA, 21 bp, synthetic construct
  source 1..21: mol_type = other DNA
gataatatgactaagcatctg

SEQ ID NO: 7791 - DNA, 21 bp, synthetic construct
  source 1..21: mol_type = other DNA
gcctccatgcaaacacaaaac

SEQ ID NO: 7792 - DNA, 21 bp, synthetic construct
  source 1..21: mol_type = other DNA
cccaacctgcagcagagccat

SEQ ID NO: 7793 - DNA, 21 bp, synthetic construct
  source 1..21: mol_type = other DNA
cccaacctgcagcacagccag

SEQ ID NO: 7794 - DNA, 21 bp, synthetic construct
  source 1..21: mol_type = other DNA
gtgctgagacccaacatcgcc

SEQ ID NO: 7795 - DNA, 21 bp, synthetic construct
  source 1..21: mol_type = other DNA
ggcaccatcggcaacggcatc

SEQ ID NO: 7796 - DNA, 21 bp, synthetic construct
  source 1..21: mol_type = other DNA
ataggggccatgggcggtatg

SEQ ID NO: 7797 - RNA, 21 nt, synthetic construct
  source 1..21: mol_type = other RNA
accaaatacaacgaaagcctc

SEQ ID NO: 7798 - DNA, 21 bp, synthetic construct
  source 1..21: mol_type = other DNA
aacagtaccgttgtcaaatct

SEQ ID NO: 7799 - DNA, 21 bp, synthetic construct
  source 1..21: mol_type = other DNA
atgttgaagactgagacgggg

SEQ ID NO: 7800 - DNA, 21 bp, synthetic construct
  source 1..21: mol_type = other DNA
atgattaaacgtgctactact

SEQ ID NO: 7801 - RNA, 21 nt, synthetic construct
  source 1..21: mol_type = other RNA
agtggggttagtgatgggcgt

SEQ ID NO: 7802 - DNA, 21 bp, synthetic construct
  source 1..21: mol_type = other DNA
agagagaagactgagcggctg

SEQ ID NO: 7803 - DNA, 21 bp, synthetic construct
  source 1..21: mol_type = other DNA
atcgggaaaggagtgagcgtg

SEQ ID NO: 7804 - DNA, 21 bp, synthetic construct
  source 1..21: mol_type = other DNA
ggggaggttaatgctgatcgg

SEQ ID NO: 7805 - DNA, 21 bp, synthetic construct
  source 1..21: mol_type = other DNA
gaaaatatgactaagcatgtg

SEQ ID NO: 7806 - DNA, 21 bp, synthetic construct
  source 1..21: mol_type = other DNA
cctacgcggggtgagaattag

SEQ ID NO: 7807 - DNA, 21 bp, synthetic construct
  source 1..21: mol_type = other DNA
ccttatgatagtcatacgagt

SEQ ID NO: 7808 - RNA, 21 nt, synthetic construct
  source 1..21: mol_type = other RNA
ccattcgactctcccagcaca

SEQ ID NO: 7809 - RNA, 21 nt, synthetic construct
  source 1..21: mol_type = other RNA
gacaagagcgccgccaccggc

SEQ ID NO: 7810 - DNA, 21 bp, synthetic construct
  source 1..21: mol_type = other DNA
ggcagacacaacgagaacccc

SEQ ID NO: 7811 - DNA, 21 bp, synthetic construct
  source 1..21: mol_type = other DNA
gtcgaaatatacggcgccctg

SEQ ID NO: 7812 - DNA, 21 bp, synthetic construct
  source 1..21: mol_type = other DNA
agagagaacactgaggggctg

SEQ ID NO: 7813 - DNA, 21 bp, synthetic construct
  source 1..21: mol_type = other DNA
ggcggactgaccatagcttca

SEQ ID NO: 7814 - RNA, 21 nt, synthetic construct
  source 1..21: mol_type = other RNA
ttggatatgtctcagaggggt

SEQ ID NO: 7815 - RNA, 21 nt, synthetic construct
  source 1..21: mol_type = other RNA
gttcgtgagccgggtacgcat

SEQ ID NO: 7816 - DNA, 21 bp, synthetic construct
  source 1..21: mol_type = other DNA
atgaaaagaggcggcgagcag

SEQ ID NO: 7817 - DNA, 21 bp, synthetic construct
  source 1..21: mol_type = other DNA
ataatgaacggcatcgttctg

SEQ ID NO: 7818 - DNA, 21 bp, synthetic construct
  source 1..21: mol_type = other DNA
cctacgcggggtgagtatgag

SEQ ID NO: 7819 - DNA, 21 bp, synthetic construct
  source 1..21: mol_type = other DNA
cccggccagagcggcaaggtg

SEQ ID NO: 7820 - DNA, 21 bp, synthetic construct
  source 1..21: mol_type = other DNA
ggggtggtaatgctgatcggc

SEQ ID NO: 7821 - RNA, 21 nt, synthetic construct
  source 1..21: mol_type = other RNA
atgatggagaagatgatgctg

SEQ ID NO: 7822 - DNA, 21 bp, synthetic construct
  source 1..21: mol_type = other DNA
gctacgcggggtgagaatgag

SEQ ID NO: 7823 - DNA, 21 bp, synthetic construct
  source 1..21: mol_type = other DNA
cctaagtcggagactgtgtag

SEQ ID NO: 7824 - RNA, 21 nt, synthetic construct
  source 1..21: mol_type = other RNA
acgtcgccgaataatagtgtg

SEQ ID NO: 7825 - DNA, 21 bp, synthetic construct
  source 1..21: mol_type = other DNA
cagacgtctagtgatactatg

SEQ ID NO: 7826 - DNA, 21 bp, synthetic construct
  source 1..21: mol_type = other DNA
atgacgatcggtaacggctac

SEQ ID NO: 7827 - DNA, 21 bp, synthetic construct
  source 1..21: mol_type = other DNA
gatgctcgtgaggagcatatc

SEQ ID NO: 7828 - DNA, 21 bp, synthetic construct
  source 1..21: mol_type = other DNA
cagatcagaggcaccgggatg

SEQ ID NO: 7829 - DNA, 21 bp, synthetic construct
  source 1..21: mol_type = other DNA
accatcagacaggtgaaaatg

SEQ ID NO: 7830 - DNA, 21 bp, synthetic construct
  source 1..21: mol_type = other DNA
agaaacgcccacaacatggac

SEQ ID NO: 7831 - DNA, 21 bp, synthetic construct
  source 1..21: mol_type = other DNA
ggcagaaacaacgagaccccc

SEQ ID NO: 7832 - RNA, 21 nt, synthetic construct
  source 1..21: mol_type = other RNA
cggcttagtgggttggaggtg

SEQ ID NO: 7833 - DNA, 21 bp, synthetic construct
  source 1..21: mol_type = other DNA
atgatgaagactcagacgggg

SEQ ID NO: 7834 - DNA, 21 bp, synthetic construct
  source 1..21: mol_type = other DNA
tatcagggggctgagtcgagt

SEQ ID NO: 7835 - DNA, 21 bp, synthetic construct
  source 1..21: mol_type = other DNA
cctaagtcggagactgtgttc

SEQ ID NO: 7836 - DNA, 21 bp, synthetic construct
  source 1..21: mol_type = other DNA
cgatacgaaaacaaccaacac

SEQ ID NO: 7837 - DNA, 21 bp, synthetic construct
  source 1..21: mol_type = other DNA
cacacgtctagtgaaactagg

SEQ ID NO: 7838 - DNA, 21 bp, synthetic construct
  source 1..21: mol_type = other DNA
cctacggggggtgagaatgag

SEQ ID NO: 7839 - DNA, 21 bp, synthetic construct
  source 1..21: mol_type = other DNA
tatcagggggctgagtagcgt

SEQ ID NO: 7840 - RNA, 21 nt, synthetic construct
  source 1..21: mol_type = other RNA
acgattaatcaggttattatt

SEQ ID NO: 7841 - DNA, 21 bp, synthetic construct
  source 1..21: mol_type = other DNA
gtcataatatacggcgccctg

SEQ ID NO: 7842 - DNA, 21 bp, synthetic construct
  source 1..21: mol_type = other DNA
tccggcctgagcggcaaggtg

SEQ ID NO: 7843 - DNA, 21 bp, synthetic construct
  source 1..21: mol_type = other DNA
ggcaccggcttggccgtgaag

SEQ ID NO: 7844 - DNA, 21 bp, synthetic construct
  source 1..21: mol_type = other DNA
gccagcaccggcaacaagctg

SEQ ID NO: 7845 - RNA, 21 nt, synthetic construct
  source 1..21: mol_type = other RNA
gcagacgttcgtaacagcgtc

SEQ ID NO: 7846 - DNA, 21 bp, synthetic construct
  source 1..21: mol_type = other DNA
gccaaacggctcagcgaagta

SEQ ID NO: 7847 - DNA, 21 bp, synthetic construct
  source 1..21: mol_type = other DNA
gataatataactaagcatgtg

SEQ ID NO: 7848 - DNA, 21 bp, synthetic construct
  source 1..21: mol_type = other DNA
cgtactagtaatagtgaagtt

SEQ ID NO: 7849 - DNA, 21 bp, synthetic construct
  source 1..21: mol_type = other DNA
caaacaacggggggtgcagta

SEQ ID NO: 7850 - DNA, 21 bp, synthetic construct
  source 1..21: mol_type = other DNA
cctacgcggggtgacaatatg

SEQ ID NO: 7851 - DNA, 21 bp, synthetic construct
  source 1..21: mol_type = other DNA
gagagaagcggcctgggcatc

SEQ ID NO: 7852 - DNA, 21 bp, synthetic construct
  source 1..21: mol_type = other DNA
cagacgactagtgaaactagg

SEQ ID NO: 7853 - DNA, 21 bp, synthetic construct
  source 1..21: mol_type = other DNA
gataatatgactaaccatgtg

SEQ ID NO: 7854 - DNA, 21 bp, synthetic construct
  source 1..21: mol_type = other DNA
gcgatgcgtcttagagaggcg

SEQ ID NO: 7855 - DNA, 21 bp, synthetic construct
  source 1..21: mol_type = other DNA
caaacaacgggggatacagta

SEQ ID NO: 7856 - DNA, 21 bp, synthetic construct
  source 1..21: mol_type = other DNA
cagatcagaggcgccgagatg

SEQ ID NO: 7857 - DNA, 21 bp, synthetic construct
  source 1..21: mol_type = other DNA
ggatacggaaacaaccaacac

SEQ ID NO: 7858 - DNA, 21 bp, synthetic construct
  source 1..21: mol_type = other DNA
agagacaagactgaggggctg

SEQ ID NO: 7859 - DNA, 21 bp, synthetic construct
  source 1..21: mol_type = other DNA
cccaaactgcagcagagccag

SEQ ID NO: 7860 - DNA, 21 bp, synthetic construct
  source 1..21: mol_type = other DNA
ggcacctgcatggccgtgaag

SEQ ID NO: 7861 - DNA, 21 bp, synthetic construct
  source 1..21: mol_type = other DNA
agcaaccagaacaacagccag

SEQ ID NO: 7862 - DNA, 21 bp, synthetic construct
  source 1..21: mol_type = other DNA
cctaagtcggagtctgtgttg

SEQ ID NO: 7863 - DNA, 21 bp, synthetic construct
  source 1..21: mol_type = other DNA
cctaagtcggatactgtgttg

SEQ ID NO: 7864 - DNA, 21 bp, synthetic construct
  source 1..21: mol_type = other DNA
gttgctcgtgaggagcttatg

SEQ ID NO: 7865 - DNA, 21 bp, synthetic construct
  source 1..21: mol_type = other DNA
ggcagacacaacgagtccccc

SEQ ID NO: 7866 - DNA, 21 bp, synthetic construct
  source 1..21: mol_type = other DNA
atagcggccatgggcggtctg

SEQ ID NO: 7867 - DNA, 21 bp, synthetic construct
  source 1..21: mol_type = other DNA
gcgatgagtcttagtgatggg

SEQ ID NO: 7868 - RNA, 21 nt, synthetic construct
  source 1..21: mol_type = other RNA
gggaggcataatgagattacg

SEQ ID NO: 7869 - DNA, 21 bp, synthetic construct
  source 1..21: mol_type = other DNA
gcgagtctgactcagactcat

SEQ ID NO: 7870 - DNA, 21 bp, synthetic construct
  source 1..21: mol_type = other DNA
ggcaacaaactggccaccccc

SEQ ID NO: 7871 - DNA, 21 bp, synthetic construct
  source 1..21: mol_type = other DNA
cctaagtcggagactgtgatg

SEQ ID NO: 7872 - DNA, 21 bp, synthetic construct
  source 1..21: mol_type = other DNA
ccctacaaccaccacaccagc

SEQ ID NO: 7873 - RNA, 21 nt, synthetic construct
  source 1..21: mol_type = other RNA
ggtctgactgggtattctcgt

SEQ ID NO: 7874 - RNA, 21 nt, synthetic construct
  source 1..21: mol_type = other RNA
gtgaagaactacggcgccctg

SEQ ID NO: 7875 - DNA, 21 bp, synthetic construct
  source 1..21: mol_type = other DNA
gtttctcgtgaggagcatatg

SEQ ID NO: 7876 - DNA, 21 bp, synthetic construct
  source 1..21: mol_type = other DNA
gtcaaaatatacggcgccccg

SEQ ID NO: 7877 - DNA, 21 bp, synthetic construct
  source 1..21: mol_type = other DNA
gatgctcgtgacgagcatatg

SEQ ID NO: 7878 - DNA, 21 bp, synthetic construct
  source 1..21: mol_type = other DNA
catacgcggggtgagaatatg

SEQ ID NO: 7879 - DNA, 21 bp, synthetic construct
  source 1..21: mol_type = other DNA
gtcaaaatatacgtcgccctg

SEQ ID NO: 7880 - DNA, 21 bp, synthetic construct
  source 1..21: mol_type = other DNA
gtcttccaacaagcacacgtt

SEQ ID NO: 7881 - DNA, 21 bp, synthetic construct
  source 1..21: mol_type = other DNA
cacgaggtggccgtgggcgtg

SEQ ID NO: 7882 - DNA, 21 bp, synthetic construct
  source 1..21: mol_type = other DNA
gtcaaaatatacggcgcccgg

SEQ ID NO: 7883 - DNA, 21 bp, synthetic construct
  source 1..21: mol_type = other DNA
aacagaaacaccagagacatc

SEQ ID NO: 7884 - RNA, 21 nt, synthetic construct
  source 1..21: mol_type = other RNA
aaagacactcaacacctaaac

SEQ ID NO: 7885 - RNA, 21 nt, synthetic construct
  source 1..21: mol_type = other RNA
gataatatgtctaagcatgtg

SEQ ID NO: 7886 - DNA, 21 bp, synthetic construct
  source 1..21: mol_type = other DNA
ggcataaagagaacccaaaac

SEQ ID NO: 7887 - DNA, 21 bp, synthetic construct
  source 1..21: mol_type = other DNA
ggcatgcaagacgaacgcatc

SEQ ID NO: 7888 - DNA, 21 bp, synthetic construct
  source 1..21: mol_type = other DNA
caaacaacggggggatccatt

SEQ ID NO: 7889 - DNA, 21 bp, synthetic construct
  source 1..21: mol_type = other DNA
ggcaagcaagacgtacgcatc

SEQ ID NO: 7890 - RNA, 21 nt, synthetic construct
  source 1..21: mol_type = other RNA
ggctaccaggacaaccagcac

SEQ ID NO: 7891 - DNA, 21 bp, synthetic construct
  source 1..21: mol_type = other DNA
cccaaccccgagaccgccctg

SEQ ID NO: 7892 - DNA, 21 bp, synthetic construct
  source 1..21: mol_type = other DNA
ggctccatgcaaacacaaacc

SEQ ID NO: 7893 - DNA, 21 bp, synthetic construct
  source 1..21: mol_type = other DNA
agacaagtgcacagcaaggac

SEQ ID NO: 7894 - DNA, 21 bp, synthetic construct
  source 1..21: mol_type = other DNA
ggctacattcaaacacaaaac

SEQ ID NO: 7895 - DNA, 21 bp, synthetic construct
  source 1..21: mol_type = other DNA
ggcagcaagctggccgccccc

SEQ ID NO: 7896 - DNA, 21 bp, synthetic construct
  source 1..21: mol_type = other DNA
ccgaataatcatcatagttct

SEQ ID NO: 7897 - RNA, 21 nt, synthetic construct
  source 1..21: mol_type = other RNA
gtgagtgctacgaagagtaat

SEQ ID NO: 7898 - DNA, 21 bp, synthetic construct
  source 1..21: mol_type = other DNA
aacagaaacaccggcgagaag

SEQ ID NO: 7899 - DNA, 21 bp, synthetic construct
  source 1..21: mol_type = other DNA
cctacgcggggtgagaaactg

SEQ ID NO: 7900 - DNA, 21 bp, synthetic construct
  source 1..21: mol_type = other DNA
cagccgtctagtgatactagg

SEQ ID NO: 7901 - RNA, 21 nt, synthetic construct
  source 1..21: mol_type = other RNA
gccaccaccggcatcaagctg

SEQ ID NO: 7902 - DNA, 21 bp, synthetic construct
  source 1..21: mol_type = other DNA
tatggtcagggtgtttctttt

SEQ ID NO: 7903 - DNA, 21 bp, synthetic construct
  source 1..21: mol_type = other DNA
atgaagatcggtaacggcttc

SEQ ID NO: 7904 - RNA, 21 nt, synthetic construct
  source 1..21: mol_type = other RNA
gtggtgcacgttaacgtagca

SEQ ID NO: 7905 - RNA, 21 nt, synthetic construct
  source 1..21: mol_type = other RNA
tccggattcgcggtgcactcc

SEQ ID NO: 7906 - DNA, 21 bp, synthetic construct
  source 1..21: mol_type = other DNA
atgatgaagactgagacgtgg

SEQ ID NO: 7907 - RNA, 21 nt, synthetic construct
  source 1..21: mol_type = other RNA
tggcacctgactgaaaactgg

SEQ ID NO: 7908 - DNA, 21 bp, synthetic construct
  source 1..21: mol_type = other DNA
aacagttccgttgacaaatct

SEQ ID NO: 7909 - DNA, 21 bp, synthetic construct
  source 1..21: mol_type = other DNA
gcaggctcagaataagcaata

SEQ ID NO: 7910 - DNA, 21 bp, synthetic construct
  source 1..21: mol_type = other DNA
agagagaagactgaggggcag

SEQ ID NO: 7911 - DNA, 21 bp, synthetic construct
  source 1..21: mol_type = other DNA
ggataagaaaacaaccaacac

SEQ ID NO: 7912 - DNA, 21 bp, synthetic construct
  source 1..21: mol_type = other DNA
accagcagccccccccttggt

SEQ ID NO: 7913 - DNA, 21 bp, synthetic construct
  source 1..21: mol_type = other DNA
gcgatgcgtgttagagagggg

SEQ ID NO: 7914 - DNA, 21 bp, synthetic construct
  source 1..21: mol_type = other DNA
cccaagcccgagaccgacctg

SEQ ID NO: 7915 - DNA, 21 bp, synthetic construct
  source 1..21: mol_type = other DNA
gtgagcgacagcaccaacaga

SEQ ID NO: 7916 - DNA, 21 bp, synthetic construct
  source 1..21: mol_type = other DNA
agtttggggaataatcagtct

SEQ ID NO: 7917 - DNA, 21 bp, synthetic construct
  source 1..21: mol_type = other DNA
accatcagtcaggtgaacatg

SEQ ID NO: 7918 - DNA, 21 bp, synthetic construct
  source 1..21: mol_type = other DNA
agcggcagaaacaacagcgag

SEQ ID NO: 7919 - RNA, 21 nt, synthetic construct
  source 1..21: mol_type = other RNA
tcgatgaatgggattactaat

SEQ ID NO: 7920 - DNA, 21 bp, synthetic construct
  source 1..21: mol_type = other DNA
gggtatgggttatctgggaat

SEQ ID NO: 7921 - DNA, 21 bp, synthetic construct
  source 1..21: mol_type = other DNA
cctacgcggggtgacaatctg

SEQ ID NO: 7922 - DNA, 21 bp, synthetic construct
  source 1..21: mol_type = other DNA
atcggcagaatcgtgaacgat

SEQ ID NO: 7923 - DNA, 21 bp, synthetic construct
  source 1..21: mol_type = other DNA
caaacaacggggggtacagta

SEQ ID NO: 7924 - DNA, 21 bp, synthetic construct
  source 1..21: mol_type = other DNA
tccatcagacaggtgaacatg

SEQ ID NO: 7925 - DNA, 21 bp, synthetic construct
  source 1..21: mol_type = other DNA
atgacgatcggtaacggcatc

SEQ ID NO: 7926 - DNA, 21 bp, synthetic construct
  source 1..21: mol_type = other DNA
ggcagcaagatggccaccccc

SEQ ID NO: 7927 - DNA, 21 bp, synthetic construct
  source 1..21: mol_type = other DNA
agactggtgcagaacgccgac

SEQ ID NO: 7928 - DNA, 21 bp, synthetic construct
  source 1..21: mol_type = other DNA
gtgaaagtctacggcgctatg

SEQ ID NO: 7929 - DNA, 21 bp, synthetic construct
  source 1..21: mol_type = other DNA
ggggtggttaatgctgatggg

SEQ ID NO: 7930 - RNA, 21 nt, synthetic construct
  source 1..21: mol_type = other RNA
ccagggaaagaacaactgctg

SEQ ID NO: 7931 - DNA, 21 bp, synthetic construct
  source 1..21: mol_type = other DNA
accggcttcgcagtacactca

SEQ ID NO: 7932 - DNA, 21 bp, synthetic construct
  source 1..21: mol_type = other DNA
gggagtctgactcagactaat

SEQ ID NO: 7933 - DNA, 21 bp, synthetic construct
  source 1..21: mol_type = other DNA
caaacaacgggggcatccagt

SEQ ID NO: 7934 - RNA, 21 nt, synthetic construct
  source 1..21: mol_type = other RNA
gccgacgggcttctgaaaatg

SEQ ID NO: 7935 - DNA, 21 bp, synthetic construct
  source 1..21: mol_type = other DNA
aacagaaacaccagcgagagg

SEQ ID NO: 7936 - DNA, 21 bp, synthetic construct
  source 1..21: mol_type = other DNA
cccaagcccgacaccgccctg

SEQ ID NO: 7937 - RNA, 21 nt, synthetic construct
  source 1..21: mol_type = other RNA
gcgttgattgttggtcagaag

SEQ ID NO: 7938 - RNA, 21 nt, synthetic construct
  source 1..21: mol_type = other RNA
ctggaaaaaaacggattaatc

SEQ ID NO: 7939 - RNA, 21 nt, synthetic construct
  source 1..21: mol_type = other RNA
ctcgttcggaacggaagagaa

SEQ ID NO: 7940 - DNA, 21 bp, synthetic construct
  source 1..21: mol_type = other DNA
cctaagcggggtgagaatatg

SEQ ID NO: 7941 - RNA, 21 nt, synthetic construct
  source 1..21: mol_type = other RNA
ggttatggtcttaagagttct

SEQ ID NO: 7942 - DNA, 21 bp, synthetic construct
  source 1..21: mol_type = other DNA
gataatatgactaagcaagtg

SEQ ID NO: 7943 - DNA, 21 bp, synthetic construct
  source 1..21: mol_type = other DNA
gcgatgcttcttagtgagggg

SEQ ID NO: 7944 - DNA, 21 bp, synthetic construct
  source 1..21: mol_type = other DNA
cactacaaccaccccaccagc

SEQ ID NO: 7945 - DNA, 21 bp, synthetic construct
  source 1..21: mol_type = other DNA
gtcaaaatatacagcgccctg

SEQ ID NO: 7946 - DNA, 21 bp, synthetic construct
  source 1..21: mol_type = other DNA
agcctgctgcagaacgccgac

SEQ ID NO: 7947 - DNA, 21 bp, synthetic construct
  source 1..21: mol_type = other DNA
caaataaaaccgaacgaacgg

SEQ ID NO: 7948 - RNA, 21 nt, synthetic construct
  source 1..21: mol_type = other RNA
gttagtcaggcccaagctcaa

SEQ ID NO: 7949 - DNA, 21 bp, synthetic construct
  source 1..21: mol_type = other DNA
ggatacgaaaacaaacaacac

SEQ ID NO: 7950 - DNA, 21 bp, synthetic construct
  source 1..21: mol_type = other DNA
caaacaacggggggatccact

SEQ ID NO: 7951 - DNA, 21 bp, synthetic construct
  source 1..21: mol_type = other DNA
ggatacgaaaacaaccaccac

SEQ ID NO: 7952 - RNA, 21 nt, synthetic construct
  source 1..21: mol_type = other RNA
agaaacgcccccaacaaggac

SEQ ID NO: 7953 - DNA, 21 bp, synthetic construct
  source 1..21: mol_type = other DNA
ggcaccggcatgtccgtgaag

SEQ ID NO: 7954 - DNA, 21 bp, synthetic construct
  source 1..21: mol_type = other DNA
aacagatacaccagcgagaag

SEQ ID NO: 7955 - DNA, 21 bp, synthetic construct
  source 1..21: mol_type = other DNA
gttgctcgaggagcatatgca

SEQ ID NO: 7956 - DNA, 21 bp, synthetic construct
  source 1..21: mol_type = other DNA
gttctcgtgaggagcatatgc

SEQ ID NO: 7957 - DNA, 21 bp, synthetic construct
  source 1..21: mol_type = other DNA
aatgtggagttcaacagagtg

SEQ ID NO: 7958 - DNA, 21 bp, synthetic construct
  source 1..21: mol_type = other DNA
gagggcagcgtgagaatggac

SEQ ID NO: 7959 - DNA, 21 bp, synthetic construct
  source 1..21: mol_type = other DNA
cccaagcacgagaccgccctg

SEQ ID NO: 7960 - DNA, 21 bp, synthetic construct
  source 1..21: mol_type = other DNA
ggcggactgcccatagcttaa

SEQ ID NO: 7961 - DNA, 21 bp, synthetic construct
  source 1..21: mol_type = other DNA
ccagggagcgaaaccactacc

SEQ ID NO: 7962 - DNA, 21 bp, synthetic construct
  source 1..21: mol_type = other DNA
agaaacgcccccaaaatggac

SEQ ID NO: 7963 - RNA, 21 nt, synthetic construct
  source 1..21: mol_type = other RNA
gcgacgcgtcttagtgagggg

SEQ ID NO: 7964 - DNA, 21 bp, synthetic construct
  source 1..21: mol_type = other DNA
ataatcaacggcatggttctg

SEQ ID NO: 7965 - DNA, 21 bp, synthetic construct
  source 1..21: mol_type = other DNA
atcggcagaaacgtgaacgag

SEQ ID NO: 7966 - DNA, 21 bp, synthetic construct
  source 1..21: mol_type = other DNA
cacgtggtggacgtgggcgtg

SEQ ID NO: 7967 - DNA, 21 bp, synthetic construct
  source 1..21: mol_type = other DNA
tctggtcagtcggggaagctg

SEQ ID NO: 7968 - DNA, 21 bp, synthetic construct
  source 1..21: mol_type = other DNA
cctaactcggagactgtgttg

SEQ ID NO: 7969 - DNA, 21 bp, synthetic construct
  source 1..21: mol_type = other DNA
cacgtggtggccgagggcgtg

SEQ ID NO: 7970 - DNA, 21 bp, synthetic construct
  source 1..21: mol_type = other DNA
gtgatcgacagcagcaacaga

SEQ ID NO: 7971 - DNA, 21 bp, synthetic construct
  source 1..21: mol_type = other DNA
gtgaaagactacggcgctctg

SEQ ID NO: 7972 - DNA, 21 bp, synthetic construct
  source 1..21: mol_type = other DNA
cacgtggaggccgtgggcgtg

SEQ ID NO: 7973 - DNA, 21 bp, synthetic construct
  source 1..21: mol_type = other DNA
ccttatgatagtcctaagagt

SEQ ID NO: 7974 - DNA, 21 bp, synthetic construct
  source 1..21: mol_type = other DNA
cctacgcggggtgagagtctg

SEQ ID NO: 7975 - DNA, 21 bp, synthetic construct
  source 1..21: mol_type = other DNA
ccgaataatcttcatagtact

SEQ ID NO: 7976 - DNA, 21 bp, synthetic construct
  source 1..21: mol_type = other DNA
gtcatgcaagacgtacgcatc

SEQ ID NO: 7977 - DNA, 21 bp, synthetic construct
  source 1..21: mol_type = other DNA
gtcaaaatatacggcgaactg

SEQ ID NO: 7978 - DNA, 21 bp, synthetic construct
  source 1..21: mol_type = other DNA
aatgctcagggtgtttctttt

SEQ ID NO: 7979 - DNA, 21 bp, synthetic construct
  source 1..21: mol_type = other DNA
accagcagccaacccgtggtg

SEQ ID NO: 7980 - DNA, 21 bp, synthetic construct
  source 1..21: mol_type = other DNA
gcgatgcgtcgtagagagggg

SEQ ID NO: 7981 - DNA, 21 bp, synthetic construct
  source 1..21: mol_type = other DNA
cctacgcggggttagaatgag

SEQ ID NO: 7982 - DNA, 21 bp, synthetic construct
  source 1..21: mol_type = other DNA
accagcagccccccccgtggt

SEQ ID NO: 7983 - DNA, 21 bp, synthetic construct
  source 1..21: mol_type = other DNA
gccacacggctcagagaagta

SEQ ID NO: 7984 - DNA, 21 bp, synthetic construct
  source 1..21: mol_type = other DNA
accatcagccacgtcatcaac

SEQ ID NO: 7985 - DNA, 21 bp, synthetic construct
  source 1..21: mol_type = other DNA
gtgagtctgactcagactcat

SEQ ID NO: 7986 - DNA, 21 bp, synthetic construct
  source 1..21: mol_type = other DNA
ggcagcaagctggccaacccc

SEQ ID NO: 7987 - DNA, 21 bp, synthetic construct
  source 1..21: mol_type = other DNA
ggatacgaaaaaaaccaacac

SEQ ID NO: 7988 - DNA, 21 bp, synthetic construct
  source 1..21: mol_type = other DNA
gtcaaaatatacggcaccctg

SEQ ID NO: 7989 - DNA, 21 bp, synthetic construct
  source 1..21: mol_type = other DNA
agaggtgagaggaatcaggag

SEQ ID NO: 7990 - DNA, 21 bp, synthetic construct
  source 1..21: mol_type = other DNA
ccaaacagaggcgaaaacgaa

SEQ ID NO: 7991 - DNA, 21 bp, synthetic construct
  source 1..21: mol_type = other DNA
gagatgagtcttagtgagggg

SEQ ID NO: 7992 - DNA, 21 bp, synthetic construct
  source 1..21: mol_type = other DNA
ccgagagtgaatttgggtgtt

SEQ ID NO: 7993 - DNA, 21 bp, synthetic construct
  source 1..21: mol_type = other DNA
tctggtcagtcggggaacgtg

SEQ ID NO: 7994 - DNA, 21 bp, synthetic construct
  source 1..21: mol_type = other DNA
agaacaggcaactctgaaatc

SEQ ID NO: 7995 - DNA, 21 bp, synthetic construct
  source 1..21: mol_type = other DNA
cccgtcctgagcggcaaggtg

SEQ ID NO: 7996 - DNA, 21 bp, synthetic construct
  source 1..21: mol_type = other DNA
caaacaacggggggtccagtc

SEQ ID NO: 7997 - DNA, 21 bp, synthetic construct
  source 1..21: mol_type = other DNA
ggctccatgcaaacacaaatc

SEQ ID NO: 7998 - DNA, 21 bp, synthetic construct
  source 1..21: mol_type = other DNA
ggctccatgcaaaaacaaaaa

SEQ ID NO: 7999 - DNA, 21 bp, synthetic construct
  source 1..21: mol_type = other DNA
gtcaaaatatacgccgccctg

SEQ ID NO: 8000 - RNA, 21 nt, synthetic construct
  source 1..21: mol_type = other RNA
gaggatcggactagggatggg

SEQ ID NO: 8001 - protein, 7 aa, synthetic construct
ATRMHVG

SEQ ID NO: 8002 - protein, 7 aa, synthetic construct
TGGVGVM

SEQ ID NO: 8003 - protein, 7 aa, synthetic construct
AGITGSG

SEQ ID NO: 8004 - protein, 7 aa, synthetic construct
GKMQYGD

SEQ ID NO: 8005 - protein, 7 aa, synthetic construct
QPVGALP

SEQ ID NO: 8006 - protein, 7 aa, synthetic construct
YMDTRSM

SEQ ID NO: 8007 - protein, 7 aa, synthetic construct
GLIKNAT

SEQ ID NO: 8008 - protein, 7 aa, synthetic construct
TRVADTD

SEQ ID NO: 8009 - protein, 7 aa, synthetic construct
TVIGVGT

SEQ ID NO: 8010 - protein, 7 aa, synthetic construct
PSSHFPA

SEQ ID NO: 8011 - protein, 7 aa, synthetic construct
ERLSDKG

SEQ ID NO: 8012 - protein, 7 aa, synthetic construct
SVLMGKA

SEQ ID NO: 8013 - protein, 7 aa, synthetic construct
GVTYQTR

SEQ ID NO: 8014 - protein, 7 aa, synthetic construct
KGMVMGT

SEQ ID NO: 8015 - protein, 7 aa, synthetic construct
GNGVISG

SEQ ID NO: 8016 - protein, 7 aa, synthetic construct
HQASVIQ

SEQ ID NO: 8017 - protein, 7 aa, synthetic construct
IYQNAMT

SEQ ID NO: 8018 - protein, 7 aa, synthetic construct
NSVSGGS

SEQ ID NO: 8019 - protein, 7 aa, synthetic construct
RSNDSHL

SEQ ID NO: 8020 - protein, 7 aa, synthetic construct
GWVEVQS

SEQ ID NO: 8021 - protein, 7 aa, synthetic construct
DSRFISS

SEQ ID NO: 8022 - protein, 7 aa, synthetic construct
LRVDYLD

SEQ ID NO: 8023 - protein, 7 aa, synthetic construct
DKMVVLA

SEQ ID NO: 8024 - protein, 7 aa, synthetic construct
AVTTQPR

SEQ ID NO: 8025 - protein, 7 aa, synthetic construct
SDLQRVT

SEQ ID NO: 8026 - protein, 7 aa, synthetic construct
PGMKMSI

SEQ ID NO: 8027 - protein, 7 aa, synthetic construct
RPVQGEN

SEQ ID NO: 8028 - protein, 7 aa, synthetic construct
KWSGVSE

SEQ ID NO: 8029 - protein, 7 aa, synthetic construct
SSAAAVA

SEQ ID NO: 8030 - protein, 7 aa, synthetic construct
VSHNIAY

SEQ ID NO: 8031 - protein, 7 aa, synthetic construct
ITNAIEF

SEQ ID NO: 8032 - protein, 7 aa, synthetic construct
AVNAVPR

SEQ ID NO: 8033 - protein, 7 aa, synthetic construct
FSSVGMT

SEQ ID NO: 8034 - protein, 7 aa, synthetic construct
LRSVPLG

SEQ ID NO: 8035 - protein, 7 aa, synthetic construct
TAAYSER

SEQ ID NO: 8036 - protein, 7 aa, synthetic construct
TVPGEVA

SEQ ID NO: 8037 - protein, 7 aa, synthetic construct
AHEINGD

SEQ ID NO: 8038 - protein, 7 aa, synthetic construct
LFGGVAA

SEQ ID NO: 8039 - protein, 7 aa, synthetic construct
FHSEKIA

SEQ ID NO: 8040 - protein, 7 aa, synthetic construct
LGISYAA

SEQ ID NO: 8041 - protein, 7 aa, synthetic construct
VSNSGGL

SEQ ID NO: 8042 - protein, 7 aa, synthetic construct
SDRGSSV

SEQ ID NO: 8043 - protein, 7 aa, synthetic construct
ISNNTRV

SEQ ID NO: 8044 - protein, 7 aa, synthetic construct
TGVGSHA

SEQ ID NO: 8045 - protein, 7 aa, synthetic construct
SYTTSFA

SEQ ID NO: 8046 - protein, 7 aa, synthetic construct
IMSQGRS

SEQ ID NO: 8047 - protein, 7 aa, synthetic construct
STGEHGG

SEQ ID NO: 8048 - protein, 7 aa, synthetic construct
LHLVSTP

SEQ ID NO: 8049 - protein, 7 aa, synthetic construct
TLVSRTG

SEQ ID NO: 8050 - protein, 7 aa, synthetic construct
AYGSDQS

SEQ ID NO: 8051 - protein, 7 aa, synthetic construct
RGVVVNS

SEQ ID NO: 8052 - protein, 7 aa, synthetic construct
IVQVAPA

SEQ ID NO: 8053 - protein, 7 aa, synthetic construct
RIEVAVG

SEQ ID NO: 8054 - protein, 7 aa, synthetic construct
IGRMSGN

SEQ ID NO: 8055 - protein, 7 aa, synthetic construct
RDSGKSS

SEQ ID NO: 8056 - protein, 7 aa, synthetic construct
SSVILET

SEQ ID NO: 8057 - protein, 7 aa, synthetic construct
EGREYKD

SEQ ID NO: 8058 - protein, 7 aa, synthetic construct
NNGTLLS

SEQ ID NO: 8059 - protein, 7 aa, synthetic construct
SNGPAPG

SEQ ID NO: 8060 - protein, 7 aa, synthetic construct
EGALHTG

SEQ ID NO: 8061 - protein, 7 aa, synthetic construct
VKPSPSV

SEQ ID NO: 8062 - protein, 7 aa, synthetic construct
TTQGPKP

SEQ ID NO: 8063 - protein, 7 aa, synthetic construct
LLDSWPA

SEQ ID NO: 8064 - protein, 7 aa, synthetic construct
AGLVHTV

SEQ ID NO: 8065 - protein, 7 aa, synthetic construct
GLQFPSA

SEQ ID NO: 8066 - protein, 7 aa, synthetic construct
SSFPANY

SEQ ID NO: 8067 - protein, 7 aa, synthetic construct
HLAGGLG

SEQ ID NO: 8068 - protein, 7 aa, synthetic construct
SNNLPLP

SEQ ID NO: 8069 - protein, 7 aa, synthetic construct
VQRLQVP

SEQ ID NO: 8070 - protein, 7 aa, synthetic construct
GPSRAVG

SEQ ID NO: 8071 - protein, 7 aa, synthetic construct
VTKSETM

SEQ ID NO: 8072 - protein, 7 aa, synthetic construct
VVGMINS

SEQ ID NO: 8073 - protein, 7 aa, synthetic construct
GSSIPLR

SEQ ID NO: 8074 - protein, 7 aa, synthetic construct
ERGDNLL

SEQ ID NO: 8075 - protein, 7 aa, synthetic construct
VVSRNIS

SEQ ID NO: 8076 - protein, 7 aa, synthetic construct
TFDARGG

SEQ ID NO: 8077 - protein, 7 aa, synthetic construct
NTGNVGS

SEQ ID NO: 8078 - protein, 7 aa, synthetic construct
GLTSQPP

SEQ ID NO: 8079 - protein, 7 aa, synthetic construct
SNQSTSR

SEQ ID NO: 8080 - protein, 7 aa, synthetic construct
GSSGSVR

SEQ ID NO: 8081 - protein, 7 aa, synthetic construct
GRGDGTA

SEQ ID NO: 8082 - protein, 7 aa, synthetic construct
FMDTLLS

SEQ ID NO: 8083 - protein, 7 aa, synthetic construct
PSMHGAG

SEQ ID NO: 8084 - protein, 7 aa, synthetic construct
IGSTYVS

SEQ ID NO: 8085 - protein, 7 aa, synthetic construct
SLEGHKL

SEQ ID NO: 8086 - protein, 7 aa, synthetic construct
LFSTTEN

SEQ ID NO: 8087 - protein, 7 aa, synthetic construct
SPNRPEP

SEQ ID NO: 8088 - protein, 7 aa, synthetic construct
GVYGAIA

SEQ ID NO: 8089 - protein, 7 aa, synthetic construct
MADRFQM

SEQ ID NO: 8090 - protein, 7 aa, synthetic construct
DGQAGVS

SEQ ID NO: 8091 - protein, 7 aa, synthetic construct
VLDVELL

SEQ ID NO: 8092 - protein, 7 aa, synthetic construct
SMGGIGS

SEQ ID NO: 8093 - protein, 7 aa, synthetic construct
QVGVNNG

SEQ ID NO: 8094 - protein, 7 aa, synthetic construct
VDGRINS

SEQ ID NO: 8095 - protein, 7 aa, synthetic construct
NLQSLTL

SEQ ID NO: 8096 - protein, 7 aa, synthetic construct
RGDSYGA

SEQ ID NO: 8097 - protein, 7 aa, synthetic construct
SSVHVIA

SEQ ID NO: 8098 - protein, 7 aa, synthetic construct
STERKGP

SEQ ID NO: 8099 - protein, 7 aa, synthetic construct
PSVGRES

SEQ ID NO: 8100 - protein, 7 aa, synthetic construct
IGGTPLS

SEQ ID NO: 8101 - protein, 7 aa, synthetic construct
SVTIPSG

SEQ ID NO: 8102 - protein, 7 aa, synthetic construct
HLGGTGM

SEQ ID NO: 8103 - protein, 7 aa, synthetic construct
RLGFLTD

SEQ ID NO: 8104 - protein, 7 aa, synthetic construct
VAREMGS

SEQ ID NO: 8105 - protein, 7 aa, synthetic construct
SHATADL

SEQ ID NO: 8106 - protein, 7 aa, synthetic construct
SDGRLAV

SEQ ID NO: 8107 - protein, 7 aa, synthetic construct
STLVSRI

SEQ ID NO: 8108 - protein, 7 aa, synthetic construct
TGARDSL

SEQ ID NO: 8109 - protein, 7 aa, synthetic construct
LKETWVA

SEQ ID NO: 8110 - protein, 7 aa, synthetic construct
REPTLEL

SEQ ID NO: 8111 - protein, 7 aa, synthetic construct
TADRYQM

SEQ ID NO: 8112 - protein, 7 aa, synthetic construct
RVLGMEN

SEQ ID NO: 8113 - protein, 7 aa, synthetic construct
SSGLANG

SEQ ID NO: 8114 - protein, 7 aa, synthetic construct
DSNGLPT

SEQ ID NO: 8115 - protein, 7 aa, synthetic construct
DDRSGAQ

SEQ ID NO: 8116 - protein, 7 aa, synthetic construct
VALAVRG

SEQ ID NO: 8117 - protein, 7 aa, synthetic construct
AIANSSI

SEQ ID NO: 8118 - protein, 7 aa, synthetic construct
SFPSVGS

SEQ ID NO: 8119 - protein, 7 aa, synthetic construct
DGVHRPS

SEQ ID NO: 8120 - protein, 7 aa, synthetic construct
RELNMMS

SEQ ID NO: 8121 - protein, 7 aa, synthetic construct
NKDGGLN

SEQ ID NO: 8122 - protein, 7 aa, synthetic construct
LGQSSVG

SEQ ID NO: 8123 - protein, 7 aa, synthetic construct
YHERVPL

SEQ ID NO: 8124 - protein, 7 aa, synthetic construct
QNGPTSR

SEQ ID NO: 8125 - protein, 7 aa, synthetic construct
GPVRVGI

SEQ ID NO: 8126 - protein, 7 aa, synthetic construct
HYVVGGA

SEQ ID NO: 8127 - protein, 7 aa, synthetic construct
MMPRSAM

SEQ ID NO: 8128 - protein, 7 aa, synthetic construct
GRGDHGV

SEQ ID NO: 8129 - protein, 7 aa, synthetic construct
MMVKHQA

SEQ ID NO: 8130 - protein, 7 aa, synthetic construct
DLNFGPG

SEQ ID NO: 8131 - protein, 7 aa, synthetic construct
RLGVSNL

SEQ ID NO: 8132 - protein, 7 aa, synthetic construct
SPQDTQG

SEQ ID NO: 8133 - protein, 7 aa, synthetic construct
QPSVGAS

SEQ ID NO: 8134 - protein, 7 aa, synthetic construct
VVNNTSW

SEQ ID NO: 8135 - protein, 7 aa, synthetic construct
TTKLLVI

SEQ ID NO: 8136 - protein, 7 aa, synthetic construct
LNGGRST

SEQ ID NO: 8137 - protein, 7 aa, synthetic construct
SGVHSVL

SEQ ID NO: 8138 - protein, 7 aa, synthetic construct
TGTVISP

SEQ ID NO: 8139 - protein, 7 aa, synthetic construct
YAGPISG

SEQ ID NO: 8140 - protein, 7 aa, synthetic construct
HSEVRGT

SEQ ID NO: 8141 - protein, 7 aa, synthetic construct
QESVSSP

SEQ ID NO: 8142 - protein, 7 aa, synthetic construct
IGTSGPV

SEQ ID NO: 8143 - protein, 7 aa, synthetic construct
SGLHSQD

SEQ ID NO: 8144 - protein, 7 aa, synthetic construct
FQNTSSA

SEQ ID NO: 8145 - protein, 7 aa, synthetic construct
AVANVPM

SEQ ID NO: 8146 - protein, 7 aa, synthetic construct
TVPGSSV

SEQ ID NO: 8147 - protein, 7 aa, synthetic construct
SMHANQA

SEQ ID NO: 8148 - protein, 7 aa, synthetic construct
NPGVVLA

SEQ ID NO: 8149 - protein, 7 aa, synthetic construct
RNPGPSI

SEQ ID NO: 8150 - protein, 7 aa, synthetic construct
GLTRLTN

SEQ ID NO: 8151 - protein, 7 aa, synthetic construct
RESTSVD

SEQ ID NO: 8152 - protein, 7 aa, synthetic construct
GERYNDT

SEQ ID NO: 8153 - protein, 7 aa, synthetic construct
GSIKEMS

SEQ ID NO: 8154 - protein, 7 aa, synthetic construct
SHRITDS

SEQ ID NO: 8155 - protein, 7 aa, synthetic construct
AGVYRAD

SEQ ID NO: 8156 - protein, 7 aa, synthetic construct
VVSGVAV

SEQ ID NO: 8157 - protein, 7 aa, synthetic construct
PPAAHSG

SEQ ID NO: 8158 - protein, 7 aa, synthetic construct
ARGIGSN

SEQ ID NO: 8159 - protein, 7 aa, synthetic construct
TGTTLTA

SEQ ID NO: 8160 - protein, 7 aa, synthetic construct
DGGGKVV

SEQ ID NO: 8161 - protein, 7 aa, synthetic construct
IGTSGAV

SEQ ID NO: 8162 - protein, 7 aa, synthetic construct
GTSGSLK

SEQ ID NO: 8163 - protein, 7 aa, synthetic construct
DLRFRQD

SEQ ID NO: 8164 - protein, 7 aa, synthetic construct
YGASSSK

SEQ ID NO: 8165 - protein, 7 aa, synthetic construct
RVALTVG

SEQ ID NO: 8166 - protein, 7 aa, synthetic construct
GVLRSED

SEQ ID NO: 8167 - protein, 7 aa, synthetic construct
AGNYAGV

SEQ ID NO: 8168 - protein, 7 aa, synthetic construct
SRGDAAI

SEQ ID NO: 8169 - protein, 7 aa, synthetic construct
LGAQNAR

SEQ ID NO: 8170 - protein, 7 aa, synthetic construct
RVTTALA

SEQ ID NO: 8171 - protein, 7 aa, synthetic construct
HNSAMNE

SEQ ID NO: 8172 - protein, 7 aa, synthetic construct
QGTSDRH

SEQ ID NO: 8173 - protein, 7 aa, synthetic construct
VNAKEAS

SEQ ID NO: 8174 - protein, 7 aa, synthetic construct
ESGAGNR

SEQ ID NO: 8175 - protein, 7 aa, synthetic construct
SMNHRVA

SEQ ID NO: 8176 - protein, 7 aa, synthetic construct
RHESLLE

SEQ ID NO: 8177 - protein, 7 aa, synthetic construct
NMLSTVP

SEQ ID NO: 8178 - protein, 7 aa, synthetic construct
TAGLTTV

SEQ ID NO: 8179 - protein, 7 aa, synthetic construct
ALGSGAT

SEQ ID NO: 8180 - protein, 7 aa, synthetic construct
RFVQSRE

SEQ ID NO: 8181 - protein, 7 aa, synthetic construct
KVPLTNV

SEQ ID NO: 8182 - protein, 7 aa, synthetic construct
RDQAVVG

SEQ ID NO: 8183 - protein, 7 aa, synthetic construct
RDRMNLH

SEQ ID NO: 8184 - protein, 7 aa, synthetic construct
IRGAGEG

SEQ ID NO: 8185 - protein, 7 aa, synthetic construct
IGSVTHS

SEQ ID NO: 8186 - protein, 7 aa, synthetic construct
GGSSHAL

SEQ ID NO: 8187 - protein, 7 aa, synthetic construct
SQLNASH

SEQ ID NO: 8188 - protein, 7 aa, synthetic construct
IGPMTVV

SEQ ID NO: 8189 - protein, 7 aa, synthetic construct
SVLSSGP

SEQ ID NO: 8190 - protein, 7 aa, synthetic construct
IVVQNRF

SEQ ID NO: 8191 - protein, 7 aa, synthetic construct
TVNSISF

SEQ ID NO: 8192 - protein, 7 aa, synthetic construct
AIANSPI

SEQ ID NO: 8193 - protein, 7 aa, synthetic construct
AAREAGS

SEQ ID NO: 8194 - protein, 7 aa, synthetic construct
GSNSSML

SEQ ID NO: 8195 - protein, 7 aa, synthetic construct
WLKPTTG

SEQ ID NO: 8196 - protein, 7 aa, synthetic construct
LNTAVSA

SEQ ID NO: 8197 - protein, 7 aa, synthetic construct
VFSSGLG

SEQ ID NO: 8198 - protein, 7 aa, synthetic construct
FDAKAPT

SEQ ID NO: 8199 - protein, 7 aa, synthetic construct
VGQTLQL

SEQ ID NO: 8200 - protein, 7 aa, synthetic construct
VEPGSHF

SEQ ID NO: 8201 - protein, 7 aa, synthetic construct
MDFGSAS

SEQ ID NO: 8202 - protein, 7 aa, synthetic construct
LTSSNTM

SEQ ID NO: 8203 - protein, 7 aa, synthetic construct
TDNLGVF

SEQ ID NO: 8204 - protein, 7 aa, synthetic construct
NAISSRS

SEQ ID NO: 8205 - protein, 7 aa, synthetic construct
EASGVRG

SEQ ID NO: 8206 - protein, 7 aa, synthetic construct
LPRREGA

SEQ ID NO: 8207 - protein, 7 aa, synthetic construct
LAGRSVP

SEQ ID NO: 8208 - protein, 6 aa, synthetic construct
TGVRSL

SEQ ID NO: 8209 - protein, 7 aa, synthetic construct
SLVNNTF

SEQ ID NO: 8210 - protein, 7 aa, synthetic construct
AGASGRP

SEQ ID NO: 8211 - protein, 7 aa, synthetic construct
GTAAIGS

SEQ ID NO: 8212 - protein, 7 aa, synthetic construct
FDQKSPY

SEQ ID NO: 8213 - protein, 7 aa, synthetic construct
ANQYPTG

SEQ ID NO: 8214 - protein, 7 aa, synthetic construct
KRGDDSM

SEQ ID NO: 8215 - protein, 7 aa, synthetic construct
VKPNSSA

SEQ ID NO: 8216 - protein, 7 aa, synthetic construct
TKMIMVG

SEQ ID NO: 8217 - protein, 7 aa, synthetic construct
TGSAVMI

SEQ ID NO: 8218 - protein, 7 aa, synthetic construct
IGAARPN

SEQ ID NO: 8219 - protein, 7 aa, synthetic construct
ATRMHEG

SEQ ID NO: 8220 - protein, 7 aa, synthetic construct
ISNNTRE

SEQ ID NO: 8221 - protein, 7 aa, synthetic construct
GWVEVQR

SEQ ID NO: 8222 - protein, 7 aa, synthetic construct
AVNAEPR

SEQ ID NO: 8223 - protein, 7 aa, synthetic construct
GWVEDQS

SEQ ID NO: 8224 - protein, 7 aa, synthetic construct
FSYVGMT

SEQ ID NO: 8225 - protein, 7 aa, synthetic construct
HPAGGLG

SEQ ID NO: 8226 - protein, 7 aa, synthetic construct
ADNAVPR

SEQ ID NO: 8227 - protein, 7 aa, synthetic construct
FSSEGMT

SEQ ID NO: 8228 - protein, 7 aa, synthetic construct
AVNAVTR

SEQ ID NO: 8229 - protein, 7 aa, synthetic construct
RPVQGEK

SEQ ID NO: 8230 - protein, 6 aa, synthetic construct
RSVPLG

SEQ ID NO: 8231 - protein, 7 aa, synthetic construct
ATRKHVG

SEQ ID NO: 8232 - protein, 7 aa, synthetic construct
AVNAVQR

SEQ ID NO: 8233 - protein, 7 aa, synthetic construct
SYTTSIA

SEQ ID NO: 8234 - protein, 7 aa, synthetic construct
MRSVPLG

SEQ ID NO: 8235 - protein, 7 aa, synthetic construct
VKPSPSE

SEQ ID NO: 8236 - protein, 7 aa, synthetic construct
YSSVGMT

SEQ ID NO: 8237 - protein, 7 aa, synthetic construct
ISSVGMT

SEQ ID NO: 8238 - protein, 7 aa, synthetic construct
FRSVGMT

SEQ ID NO: 8239 - protein, 7 aa, synthetic construct
TAEYSER

SEQ ID NO: 8240 - protein, 7 aa, synthetic construct
AHEIKGD

SEQ ID NO: 8241 - protein, 7 aa, synthetic construct
ATRMNVG

SEQ ID NO: 8242 - protein, 7 aa, synthetic construct
ANEINGD

SEQ ID NO: 8243 - protein, 7 aa, synthetic construct
IMSQGRR

SEQ ID NO: 8244 - protein, 7 aa, synthetic construct
GLQLPSA

SEQ ID NO: 8245 - protein, 7 aa, synthetic construct
AVNDVPR

SEQ ID NO: 8246 - protein, 7 aa, synthetic construct
AHEKNGD

SEQ ID NO: 8247 - protein, 7 aa, synthetic construct
YHSEKIA

SEQ ID NO: 8248 - protein, 7 aa, synthetic construct
HQASDIQ

SEQ ID NO: 8249 - protein, 7 aa, synthetic construct
LGIRYAA

SEQ ID NO: 8250 - protein, 7 aa, synthetic construct
TVPGEDA

SEQ ID NO: 8251 - protein, 7 aa, synthetic construct
IHSEKIA

SEQ ID NO: 8252 - protein, 7 aa, synthetic construct
LSSVPLG

SEQ ID NO: 8253 - protein, 7 aa, synthetic construct
LRSVPMG

SEQ ID NO: 8254 - protein, 7 aa, synthetic construct
QPDGALP

SEQ ID NO: 8255 - protein, 7 aa, synthetic construct
LGISYEA

SEQ ID NO: 8256 - protein, 6 aa, synthetic construct
SNNPLP

SEQ ID NO: 8257 - protein, 7 aa, synthetic construct
TDPGEVA

SEQ ID NO: 8258 - protein, 7 aa, synthetic construct
SVLSPGP

SEQ ID NO: 8259 - protein, 6 aa, synthetic construct
VSNGGL

SEQ ID NO: 8260 - protein, 7 aa, synthetic construct
HQASVIK

SEQ ID NO: 8261 - protein, 7 aa, synthetic construct
DSRFIRS

SEQ ID NO: 8262 - protein, 7 aa, synthetic construct
FHREKIA

SEQ ID NO: 8263 - protein, 7 aa, synthetic construct
EVNAVPR

SEQ ID NO: 8264 - protein, 7 aa, synthetic construct
ERLRDKG

SEQ ID NO: 8265 - protein, 6 aa, synthetic construct
LRSVPG

SEQ ID NO: 8266 - protein, 7 aa, synthetic construct
HKASVIQ

SEQ ID NO: 8267 - protein, 7 aa, synthetic construct
AHEINGA

SEQ ID NO: 8268 - protein, 7 aa, synthetic construct
GLQFTSA

SEQ ID NO: 8269 - protein, 7 aa, synthetic construct
TLESRTG

SEQ ID NO: 8270 - protein, 7 aa, synthetic construct
VSISGGL

SEQ ID NO: 8271 - protein, 7 aa, synthetic construct
GVTYKTR

SEQ ID NO: 8272 - protein, 7 aa, synthetic construct
AVNALPR

SEQ ID NO: 8273 - protein, 7 aa, synthetic construct
AHEINWD

SEQ ID NO: 8274 - protein, 7 aa, synthetic construct
AGLVHTD

SEQ ID NO: 8275 - protein, 7 aa, synthetic construct
AVKAVPR

SEQ ID NO: 8276 - protein, 7 aa, synthetic construct
QPVGALT

SEQ ID NO: 8277 - protein, 7 aa, synthetic construct
GWVDVQS

SEQ ID NO: 8278 - protein, 7 aa, synthetic construct
TAANSER

SEQ ID NO: 8279 - protein, 7 aa, synthetic construct
SNNMPLP

SEQ ID NO: 8280 - protein, 7 aa, synthetic construct
GKMKYGD

SEQ ID NO: 8281 - protein, 7 aa, synthetic construct
YMDTRSK

SEQ ID NO: 8282 - protein, 7 aa, synthetic construct
LRSVTLG

SEQ ID NO: 8283 - protein, 7 aa, synthetic construct
PSSHYPA

SEQ ID NO: 8284 - protein, 7 aa, synthetic construct
ATRIHVG

SEQ ID NO: 8285 - protein, 7 aa, synthetic construct
TAAYYER

SEQ ID NO: 8286 - protein, 7 aa, synthetic construct
TVHGEVA

SEQ ID NO: 8287 - protein, 7 aa, synthetic construct
SDRGSRV

SEQ ID NO: 8288 - protein, 7 aa, synthetic construct
YMDTRTM

SEQ ID NO: 8289 - protein, 7 aa, synthetic construct
RDSGKRS

SEQ ID NO: 8290 - protein, 7 aa, synthetic construct
TAAYTER

SEQ ID NO: 8291 - protein, 7 aa, synthetic construct
GWVEVKS

SEQ ID NO: 8292 - protein, 7 aa, synthetic construct
IGTSGPD

SEQ ID NO: 8293 - protein, 7 aa, synthetic construct
TGGVGVK

SEQ ID NO: 8294 - protein, 7 aa, synthetic construct
TGVGRHA

SEQ ID NO: 8295 - protein, 7 aa, synthetic construct
GLQIPSA

SEQ ID NO: 8296 - protein, 7 aa, synthetic construct
LRSVHLG

SEQ ID NO: 8297 - protein, 7 aa, synthetic construct
LRSDPLG

SEQ ID NO: 8298 - protein, 7 aa, synthetic construct
ESNSGGL

SEQ ID NO: 8299 - protein, 7 aa, synthetic construct
AVNAVPS

SEQ ID NO: 8300 - protein, 7 aa, synthetic construct
SDRGSSE

SEQ ID NO: 8301 - protein, 7 aa, synthetic construct
TGARDRL

SEQ ID NO: 8302 - protein, 7 aa, synthetic construct
RPEQGEN

SEQ ID NO: 8303 - protein, 7 aa, synthetic construct
NMDTRSM

SEQ ID NO: 8304 - protein, 7 aa, synthetic construct
TVRGSVD

SEQ ID NO: 8305 - protein, 7 aa, synthetic construct
LSSVGMT

SEQ ID NO: 8306 - protein, 7 aa, synthetic construct
TVTGEVA

SEQ ID NO: 8307 - protein, 7 aa, synthetic construct
AGITGRG

SEQ ID NO: 8308 - protein, 7 aa, synthetic construct
ALNAVPR

SEQ ID NO: 8309 - protein, 7 aa, synthetic construct
FHSEKID

SEQ ID NO: 8310 - protein, 7 aa, synthetic construct
AYGSDQT

SEQ ID NO: 8311 - protein, 7 aa, synthetic construct
SDRGRSV

SEQ ID NO: 8312 - protein, 7 aa, synthetic construct
FSTVGMT

SEQ ID NO: 8313 - protein, 7 aa, synthetic construct
TADRYQK

SEQ ID NO: 8314 - protein, 7 aa, synthetic construct
AHEINAD

SEQ ID NO: 8315 - protein, 7 aa, synthetic construct
PSVGRER

SEQ ID NO: 8316 - protein, 7 aa, synthetic construct
AHEINRD

SEQ ID NO: 8317 - protein, 7 aa, synthetic construct
LHLDSTP

SEQ ID NO: 8318 - protein, 7 aa, synthetic construct
PSSHIPA

SEQ ID NO: 8319 - protein, 7 aa, synthetic construct
TDRGSSV

SEQ ID NO: 8320 - protein, 7 aa, synthetic construct
VKQSPSV

SEQ ID NO: 8321 - protein, 7 aa, synthetic construct
GWDEVQS

SEQ ID NO: 8322 - protein, 7 aa, synthetic construct
DSRIISS

SEQ ID NO: 8323 - protein, 7 aa, synthetic construct
SYTTSYA

SEQ ID NO: 8324 - protein, 7 aa, synthetic construct
RGVEVNS

SEQ ID NO: 8325 - protein, 7 aa, synthetic construct
LYGGVAA

SEQ ID NO: 8326 - protein, 7 aa, synthetic construct
TVPGEVE

SEQ ID NO: 8327 - protein, 6 aa, synthetic construct
LGISAA

SEQ ID NO: 8328 - protein, 7 aa, synthetic construct
HQAGGLG

SEQ ID NO: 8329 - protein, 7 aa, synthetic construct
VVGMINR

SEQ ID NO: 8330 - protein, 7 aa, synthetic construct
GRVEVQS

SEQ ID NO: 8331 - protein, 7 aa, synthetic construct
SMDTLLS

SEQ ID NO: 8332 - protein, 7 aa, synthetic construct
LIGGVAA

SEQ ID NO: 8333 - protein, 7 aa, synthetic construct
FSSVCMT

SEQ ID NO: 8334 - protein, 7 aa, synthetic construct
SSFHANY

SEQ ID NO: 8335 - protein, 7 aa, synthetic construct
FSSVGKT

SEQ ID NO: 8336 - protein, 7 aa, synthetic construct
QGISYAA

SEQ ID NO: 8337 - protein, 7 aa, synthetic construct
RPVKGEN

SEQ ID NO: 8338 - protein, 7 aa, synthetic construct
GLIKKAT

SEQ ID NO: 8339 - protein, 7 aa, synthetic construct
SHRITDR

SEQ ID NO: 8340 - protein, 7 aa, synthetic construct
SNNLPLT

SEQ ID NO: 8341 - protein, 7 aa, synthetic construct
SYTTTFA

SEQ ID NO: 8342 - protein, 7 aa, synthetic construct
VTKSETK

SEQ ID NO: 8343 - protein, 7 aa, synthetic construct
LRSVRLG

SEQ ID NO: 8344 - protein, 7 aa, synthetic construct
LFSTTEK

SEQ ID NO: 8345 - protein, 7 aa, synthetic construct
TGARDSI

SEQ ID NO: 8346 - protein, 7 aa, synthetic construct
HFGGVAA

SEQ ID NO: 8347 - protein, 7 aa, synthetic construct
DSNGLQT

SEQ ID NO: 8348 - protein, 7 aa, synthetic construct
ATRMQVG

SEQ ID NO: 8349 - protein, 7 aa, synthetic construct
LLGGVAA

SEQ ID NO: 8350 - protein, 7 aa, synthetic construct
SSVHVIT

SEQ ID NO: 8351 - protein, 7 aa, synthetic construct
TFDDRGG

SEQ ID NO: 8352 - protein, 7 aa, synthetic construct
VTKRETM

SEQ ID NO: 8353 - protein, 7 aa, synthetic construct
TRVADTE

SEQ ID NO: 8354 - protein, 7 aa, synthetic construct
VKPTPSV

SEQ ID NO: 8355 - protein, 7 aa, synthetic construct
ILDSWPA

SEQ ID NO: 8356 - protein, 7 aa, synthetic construct
IGRMSGD

SEQ ID NO: 8357 - protein, 6 aa, synthetic construct
ERGDNL

SEQ ID NO: 8358 - protein, 7 aa, synthetic construct
FSSVGMK

SEQ ID NO: 8359 - protein, 7 aa, synthetic construct
NSVRGGS

SEQ ID NO: 8360 - protein, 7 aa, synthetic construct
VSNTGGL

SEQ ID NO: 8361 - protein, 6 aa, synthetic construct
NNGTLS

SEQ ID NO: 8362 - protein, 7 aa, synthetic construct
AVNPVPR

SEQ ID NO: 8363 - protein, 7 aa, synthetic construct
NSNNTRV

SEQ ID NO: 8364 - protein, 7 aa, synthetic construct
YKDTRSM

SEQ ID NO: 8365 - protein, 7 aa, synthetic construct
NNGTMLS

SEQ ID NO: 8366 - protein, 7 aa, synthetic construct
RQVQGEN

SEQ ID NO: 8367 - protein, 7 aa, synthetic construct
LHSEKIA

SEQ ID NO: 8368 - protein, 7 aa, synthetic construct
EGREYKE

SEQ ID NO: 8369 - protein, 7 aa, synthetic construct
GVTNQTR

SEQ ID NO: 8370 - protein, 7 aa, synthetic construct
SSFTANY

SEQ ID NO: 8371 - protein, 7 aa, synthetic construct
LLDSRPA

SEQ ID NO: 8372 - protein, 7 aa, synthetic construct
MHLVSTP

SEQ ID NO: 8373 - protein, 7 aa, synthetic construct
EQRLQVP

SEQ ID NO: 8374 - protein, 6 aa, synthetic construct
TAASER

SEQ ID NO: 8375 - protein, 7 aa, synthetic construct
RGVVVNT

SEQ ID NO: 8376 - protein, 6 aa, synthetic construct
FMDTLS

SEQ ID NO: 8377 - protein, 7 aa, synthetic construct
EKPSPSV

SEQ ID NO: 8378 - protein, 7 aa, synthetic construct
GSSGSER

SEQ ID NO: 8379 - protein, 6 aa, synthetic construct
HLVSTP

SEQ ID NO: 8380 - protein, 7 aa, synthetic construct
TGGDGVM

SEQ ID NO: 8381 - protein, 7 aa, synthetic construct
RIEEAVG

SEQ ID NO: 8382 - protein, 7 aa, synthetic construct
GCVEVQS

SEQ ID NO: 8383 - protein, 7 aa, synthetic construct
TEIGVGT

SEQ ID NO: 8384 - protein, 7 aa, synthetic construct
HQARVIQ

SEQ ID NO: 8385 - protein, 7 aa, synthetic construct
GKMQYGE

SEQ ID NO: 8386 - protein, 7 aa, synthetic construct
SSVIMET

SEQ ID NO: 8387 - protein, 7 aa, synthetic construct
AVANEPM

SEQ ID NO: 8388 - protein, 7 aa, synthetic construct
SNQTTSR

SEQ ID NO: 8389 - protein, 7 aa, synthetic construct
DTRMHVG

SEQ ID NO: 8390 - protein, 7 aa, synthetic construct
GKMQNGD

SEQ ID NO: 8391 - protein, 7 aa, synthetic construct
FHSEKNA

SEQ ID NO: 8392 - protein, 7 aa, synthetic construct
IYQKAMT

SEQ ID NO: 8393 - protein, 7 aa, synthetic construct
NMSQGRS

SEQ ID NO: 8394 - protein, 7 aa, synthetic construct
EGALHTR

SEQ ID NO: 8395 - protein, 7 aa, synthetic construct
AHEINVD

SEQ ID NO: 8396 - protein, 6 aa, synthetic construct
GKMQGD

SEQ ID NO: 8397 - protein, 7 aa, synthetic construct
TLPGEVA

SEQ ID NO: 8398 - protein, 7 aa, synthetic construct
IVKVAPA

SEQ ID NO: 8399 - protein, 7 aa, synthetic construct
LFGGVAE

SEQ ID NO: 8400 - protein, 7 aa, synthetic construct
SDLQRET

SEQ ID NO: 8401 - protein, 7 aa, synthetic construct
RIEVADG

SEQ ID NO: 8402 - protein, 7 aa, synthetic construct
DTKSETM

SEQ ID NO: 8403 - protein, 7 aa, synthetic construct
PSSHFTA

SEQ ID NO: 8404 - protein, 7 aa, synthetic construct
PSMQGAG

SEQ ID NO: 8405 - protein, 7 aa, synthetic construct
GLIKNDT

SEQ ID NO: 8406 - protein, 7 aa, synthetic construct
ERGDNML

SEQ ID NO: 8407 - protein, 7 aa, synthetic construct
NVQVAPA

SEQ ID NO: 8408 - protein, 7 aa, synthetic construct
LGISYAE

SEQ ID NO: 8409 - protein, 7 aa, synthetic construct
SNQSTRR

SEQ ID NO: 8410 - protein, 7 aa, synthetic construct
LRSVPLC

SEQ ID NO: 8411 - protein, 7 aa, synthetic construct
SGGVGVM

SEQ ID NO: 8412 - protein, 7 aa, synthetic construct
SPLVSRI

SEQ ID NO: 8413 - protein, 7 aa, synthetic construct
TGDGSHA

SEQ ID NO: 8414 - protein, 7 aa, synthetic construct
TTGEHGG

SEQ ID NO: 8415 - protein, 7 aa, synthetic construct
AGGVGVM

SEQ ID NO: 8416 - protein, 7 aa, synthetic construct
SYTTSLA

SEQ ID NO: 8417 - protein, 7 aa, synthetic construct
DSRFISY

SEQ ID NO: 8418 - protein, 7 aa, synthetic construct
VVNNTSR

SEQ ID NO: 8419 - protein, 7 aa, synthetic construct
TADSYQM

SEQ ID NO: 8420 - protein, 7 aa, synthetic construct
TVPGEVV

SEQ ID NO: 8421 - protein, 7 aa, synthetic construct
VSKSGGL

SEQ ID NO: 8422 - protein, 7 aa, synthetic construct
NTGNVGR

SEQ ID NO: 8423 - protein, 7 aa, synthetic construct
TYTTSFA

SEQ ID NO: 8424 - protein, 7 aa, synthetic construct
TIDARGG

SEQ ID NO: 8425 - protein, 7 aa, synthetic construct
SSVIQET

SEQ ID NO: 8426 - protein, 7 aa, synthetic construct
IEQVAPA

SEQ ID NO: 8427 - protein, 7 aa, synthetic construct
DDRRGAQ

SEQ ID NO: 8428 - protein, 7 aa, synthetic construct
AVNSVPR

SEQ ID NO: 8429 - protein, 7 aa, synthetic construct
VQRLQDP

SEQ ID NO: 8430 - protein, 7 aa, synthetic construct
VALAGRG

SEQ ID NO: 8431 - protein, 7 aa, synthetic construct
SNNLTLP

SEQ ID NO: 8432 - protein, 7 aa, synthetic construct
TQVSRTG

SEQ ID NO: 8433 - protein, 7 aa, synthetic construct
RVTIPSG

SEQ ID NO: 8434 - protein, 7 aa, synthetic construct
VQRMQVP

SEQ ID NO: 8435 - protein, 7 aa, synthetic construct
SNTTSFA

SEQ ID NO: 8436 - protein, 7 aa, synthetic construct
AGLDHTV

SEQ ID NO: 8437 - protein, 7 aa, synthetic construct
DGVHRHS

SEQ ID NO: 8438 - protein, 7 aa, synthetic construct
AGIKGSG

SEQ ID NO: 8439 - protein, 7 aa, synthetic construct
GKMQYVD

SEQ ID NO: 8440 - protein, 7 aa, synthetic construct
ATRLHVG

SEQ ID NO: 8441 - protein, 7 aa, synthetic construct
AIANRSI

SEQ ID NO: 8442 - protein, 7 aa, synthetic construct
NTGNDGS

SEQ ID NO: 8443 - protein, 6 aa, synthetic construct
SSFPAN

SEQ ID NO: 8444 - protein, 7 aa, synthetic construct
IVQEAPA

SEQ ID NO: 8445 - protein, 7 aa, synthetic construct
RPVQREN

SEQ ID NO: 8446 - protein, 7 aa, synthetic construct
VQRLQVT

SEQ ID NO: 8447 - protein, 7 aa, synthetic construct
LRSLPLG

SEQ ID NO: 8448 - protein, 7 aa, synthetic construct
GNGDISG

SEQ ID NO: 8449 - protein, 7 aa, synthetic construct
SDLMGKA

SEQ ID NO: 8450 - protein, 7 aa, synthetic construct
NNGTLIS

SEQ ID NO: 8451 - protein, 6 aa, synthetic construct
GSIPLR

SEQ ID NO: 8452 - protein, 7 aa, synthetic construct
IGRMRGN

SEQ ID NO: 8453 - protein, 7 aa, synthetic construct
LFGGDAA

SEQ ID NO: 8454 - protein, 7 aa, synthetic construct
IGSTYES

SEQ ID NO: 8455 - protein, 7 aa, synthetic construct
IMTQGRS

SEQ ID NO: 8456 - protein, 7 aa, synthetic construct
LGISNAA

SEQ ID NO: 8457 - protein, 7 aa, synthetic construct
AHEINGE

SEQ ID NO: 8458 - protein, 7 aa, synthetic construct
NGRMSGN

SEQ ID NO: 8459 - protein, 7 aa, synthetic construct
TPAYSER

SEQ ID NO: 8460 - protein, 7 aa, synthetic construct
ATRMHLG

SEQ ID NO: 8461 - protein, 7 aa, synthetic construct
GKMQHGD

SEQ ID NO: 8462 - protein, 7 aa, synthetic construct
YIDTRSM

SEQ ID NO: 8463 - protein, 7 aa, synthetic construct
RNGPAPG

SEQ ID NO: 8464 - protein, 7 aa, synthetic construct
RSFPANY

SEQ ID NO: 8465 - protein, 7 aa, synthetic construct
SNGHAPG

SEQ ID NO: 8466 - protein, 7 aa, synthetic construct
FSSVGMA

SEQ ID NO: 8467 - protein, 7 aa, synthetic construct
NSESGGS

SEQ ID NO: 8468 - protein, 7 aa, synthetic construct
TVLMGKA

SEQ ID NO: 8469 - protein, 7 aa, synthetic construct
DKMEVLA

SEQ ID NO: 8470 - protein, 7 aa, synthetic construct
TAADSER

SEQ ID NO: 8471 - protein, 7 aa, synthetic construct
DGQAGES

SEQ ID NO: 8472 - protein, 7 aa, synthetic construct
IMSQRRS

SEQ ID NO: 8473 - protein, 7 aa, synthetic construct
PSMNGAG

SEQ ID NO: 8474 - protein, 7 aa, synthetic construct
ADTTQPR

SEQ ID NO: 8475 - protein, 7 aa, synthetic construct
IGRMSGK

SEQ ID NO: 8476 - protein, 7 aa, synthetic construct
DGGGKDV

SEQ ID NO: 8477 - protein, 7 aa, synthetic construct
GSVEVQS

SEQ ID NO: 8478 - protein, 7 aa, synthetic construct
GSSIQLR

SEQ ID NO: 8479 - protein, 7 aa, synthetic construct
SDLGSSV

SEQ ID NO: 8480 - protein, 7 aa, synthetic construct
TGGVGGM

SEQ ID NO: 8481 - protein, 7 aa, synthetic construct
TGGVGVL

SEQ ID NO: 8482 - protein, 7 aa, synthetic construct
ATRMLVG

SEQ ID NO: 8483 - protein, 6 aa, synthetic construct
GVTQTR

SEQ ID NO: 8484 - protein, 7 aa, synthetic construct
ERGDNLI

SEQ ID NO: 8485 - protein, 7 aa, synthetic construct
AVNAVLR

SEQ ID NO: 8486 - protein, 7 aa, synthetic construct
VKPSPTV

SEQ ID NO: 8487 - protein, 7 aa, synthetic construct
FNSEKIA

SEQ ID NO: 8488 - protein, 7 aa, synthetic construct
ATRMHVR

SEQ ID NO: 8489 - protein, 6 aa, synthetic construct
TGARDS

SEQ ID NO: 8490 - protein, 7 aa, synthetic construct
IKSQGRS

SEQ ID NO: 8491 - protein, 6 aa, synthetic construct
LDSWPA

SEQ ID NO: 8492 - protein, 7 aa, synthetic construct
SHATAAL

SEQ ID NO: 8493 - protein, 7 aa, synthetic construct
LLDSCPA

SEQ ID NO: 8494 - protein, 7 aa, synthetic construct
PSSHFHA

SEQ ID NO: 8495 - protein, 7 aa, synthetic construct
DGVHRPT

SEQ ID NO: 8496 - protein, 7 aa, synthetic construct
VDGRINR

SEQ ID NO: 8497 - protein, 7 aa, synthetic construct
HMAGGLG

SEQ ID NO: 8498 - protein, 7 aa, synthetic construct
LGISYSA

SEQ ID NO: 8499 - protein, 7 aa, synthetic construct
EVGMINS

SEQ ID NO: 8500 - protein, 7 aa, synthetic construct
GLQFHSA

SEQ ID NO: 8501 - protein, 7 aa, synthetic construct
SFPRVGS

SEQ ID NO: 8502 - protein, 7 aa, synthetic construct
LGQSRVG

SEQ ID NO: 8503 - protein, 7 aa, synthetic construct
LHHVSTP

SEQ ID NO: 8504 - protein, 7 aa, synthetic construct
TGVGSNA

SEQ ID NO: 8505 - protein, 7 aa, synthetic construct
SHQDTQG

SEQ ID NO: 8506 - protein, 7 aa, synthetic construct
RSGLANG

SEQ ID NO: 8507 - protein, 7 aa, synthetic construct
GETYQTR

SEQ ID NO: 8508 - protein, 7 aa, synthetic construct
TPQGPKP

SEQ ID NO: 8509 - protein, 7 aa, synthetic construct
TYDARGG

SEQ ID NO: 8510 - protein, 7 aa, synthetic construct
QNGPTRR

SEQ ID NO: 8511 - protein, 7 aa, synthetic construct
RGVVDNS

SEQ ID NO: 8512 - protein, 7 aa, synthetic construct
SLEGHKQ

SEQ ID NO: 8513 - protein, 7 aa, synthetic construct
AVYAVPR

SEQ ID NO: 8514 - protein, 7 aa, synthetic construct
VQRLQVQ

SEQ ID NO: 8515 - protein, 7 aa, synthetic construct
VAREMGR

SEQ ID NO: 8516 - protein, 7 aa, synthetic construct
YHERVPM

SEQ ID NO: 8517 - protein, 7 aa, synthetic construct
GSRGSVR

SEQ ID NO: 8518 - protein, 7 aa, synthetic construct
TGGVGEM

SEQ ID NO: 8519 - protein, 7 aa, synthetic construct
PSSHLPA

SEQ ID NO: 8520 - protein, 7 aa, synthetic construct
RVALTEG

SEQ ID NO: 8521 - protein, 7 aa, synthetic construct
LFGGVDA

SEQ ID NO: 8522 - protein, 7 aa, synthetic construct
AGVYRAA

SEQ ID NO: 8523 - protein, 7 aa, synthetic construct
IMSQGLS

SEQ ID NO: 8524 - protein, 7 aa, synthetic construct
SYTTSFE

SEQ ID NO: 8525 - protein, 7 aa, synthetic construct
LLDSWTA

SEQ ID NO: 8526 - protein, 7 aa, synthetic construct
LRTVPLG

SEQ ID NO: 8527 - protein, 7 aa, synthetic construct
TDAYSER

SEQ ID NO: 8528 - protein, 7 aa, synthetic construct
DSRFIST

SEQ ID NO: 8529 - protein, 7 aa, synthetic construct
ATRMRVG

SEQ ID NO: 8530 - protein, 7 aa, synthetic construct
GLTRLTD

SEQ ID NO: 8531 - protein, 7 aa, synthetic construct
SSIPANY

SEQ ID NO: 8532 - protein, 7 aa, synthetic construct
SSFPANN

SEQ ID NO: 8533 - protein, 7 aa, synthetic construct
IMSKGRS

SEQ ID NO: 8534 - protein, 7 aa, synthetic construct
AGNAVPR

SEQ ID NO: 8535 - protein, 7 aa, synthetic construct
AQEINGD

SEQ ID NO: 8536 - protein, 7 aa, synthetic construct
LRSVPFG

SEQ ID NO: 8537 - protein, 7 aa, synthetic construct
EGRENKD

SEQ ID NO: 8538 - protein, 7 aa, synthetic construct
AYVSDQS

SEQ ID NO: 8539 - protein, 7 aa, synthetic construct
VVSRNIR

SEQ ID NO: 8540 - protein, 7 aa, synthetic construct
VSNSGGH

SEQ ID NO: 8541 - protein, 7 aa, synthetic construct
STGEHAG

SEQ ID NO: 8542 - protein, 7 aa, synthetic construct
KRSGVSE

SEQ ID NO: 8543 - protein, 7 aa, synthetic construct
HNSAKNE

SEQ ID NO: 8544 - protein, 7 aa, synthetic construct
HSSHFPA

SEQ ID NO: 8545 - protein, 7 aa, synthetic construct
TGVGSPA

SEQ ID NO: 8546 - protein, 7 aa, synthetic construct
TLDARGG

SEQ ID NO: 8547 - protein, 7 aa, synthetic construct
PAAYSER

SEQ ID NO: 8548 - protein, 7 aa, synthetic construct
LFVGVAA

SEQ ID NO: 8549 - protein, 7 aa, synthetic construct
AARMHVG

SEQ ID NO: 8550 - protein, 7 aa, synthetic construct
YMDTSSM

SEQ ID NO: 8551 - protein, 7 aa, synthetic construct
YMDTRYM

SEQ ID NO: 8552 - protein, 7 aa, synthetic construct
NNGKLLS

SEQ ID NO: 8553 - protein, 7 aa, synthetic construct
GLQYPSA

SEQ ID NO: 8554 - protein, 7 aa, synthetic construct
SDRRSSV

SEQ ID NO: 8555 - protein, 7 aa, synthetic construct
SSVHVIE

SEQ ID NO: 8556 - protein, 7 aa, synthetic construct
SGVHSDL

SEQ ID NO: 8557 - protein, 7 aa, synthetic construct
SGVHSVQ

SEQ ID NO: 8558 - protein, 7 aa, synthetic construct
RGVVVKS

SEQ ID NO: 8559 - protein, 7 aa, synthetic construct
GWVEVRS

SEQ ID NO: 8560 - protein, 7 aa, synthetic construct
VTNSGGL

SEQ ID NO: 8561 - protein, 7 aa, synthetic construct
IYQNDMT

SEQ ID NO: 8562 - protein, 7 aa, synthetic construct
GKKQYGD

SEQ ID NO: 8563 - protein, 7 aa, synthetic construct
GHSRAVG

SEQ ID NO: 8564 - protein, 7 aa, synthetic construct
NLQSLTQ

SEQ ID NO: 8565 - protein, 7 aa, synthetic construct
RGVVVIS

SEQ ID NO: 8566 - protein, 7 aa, synthetic construct
LFCGVAA

SEQ ID NO: 8567 - protein, 7 aa, synthetic construct
VLDEELL

SEQ ID NO: 8568 - protein, 7 aa, synthetic construct
FSSVGMR

SEQ ID NO: 8569 - protein, 7 aa, synthetic construct
TGTVISH

SEQ ID NO: 8570 - protein, 7 aa, synthetic construct
HYEVGGA

SEQ ID NO: 8571 - protein, 7 aa, synthetic construct
HLGVLVW

SEQ ID NO: 8572 - protein, 7 aa, synthetic construct
GPSRAEG

SEQ ID NO: 8573 - protein, 6 aa, synthetic construct
YHERVP

SEQ ID NO: 8574 - protein, 7 aa, synthetic construct
TNQSTSR

SEQ ID NO: 8575 - protein, 7 aa, synthetic construct
SSFPDNY

SEQ ID NO: 8576 - protein, 6 aa, synthetic construct
RDSGKS

SEQ ID NO: 8577 - protein, 7 aa, synthetic construct
EGAQHTG

SEQ ID NO: 8578 - protein, 7 aa, synthetic construct
GRSIPLR

SEQ ID NO: 8579 - protein, 7 aa, synthetic construct
LRSVPLV

SEQ ID NO: 8580 - protein, 7 aa, synthetic construct
RGDVVNS

SEQ ID NO: 8581 - protein, 7 aa, synthetic construct
DLNYGPG

SEQ ID NO: 8582 - protein, 7 aa, synthetic construct
DKMVVLD

SEQ ID NO: 8583 - protein, 7 aa, synthetic construct
GVYGAID

SEQ ID NO: 8584 - protein, 7 aa, synthetic construct
TAARYQM

SEQ ID NO: 8585 - protein, 7 aa, synthetic construct
QPSVGAR

SEQ ID NO: 8586 - protein, 7 aa, synthetic construct
LGSSYAA

SEQ ID NO: 8587 - protein, 7 aa, synthetic construct
AHEINGG

SEQ ID NO: 8588 - protein, 7 aa, synthetic construct
AHDINGD

SEQ ID NO: 8589 - protein, 7 aa, synthetic construct
AHGINGD

SEQ ID NO: 8590 - protein, 6 aa, synthetic construct
VQRQVP

SEQ ID NO: 8591 - protein, 7 aa, synthetic construct
SYTTSFS

SEQ ID NO: 8592 - protein, 7 aa, synthetic construct
LLDTWPA

SEQ ID NO: 8593 - protein, 7 aa, synthetic construct
LFGVVAA

SEQ ID NO: 8594 - protein, 7 aa, synthetic construct
ANGSDQS

SEQ ID NO: 8595 - protein, 6 aa, synthetic construct
LHLVTP

SEQ ID NO: 8596 - protein, 7 aa, synthetic construct
FSSVGMM

SEQ ID NO: 8597 - protein, 7 aa, synthetic construct
QPVAALP

SEQ ID NO: 8598 - protein, 7 aa, synthetic construct
ATRMHVV

SEQ ID NO: 8599 - protein, 6 aa, synthetic construct
ATRMHV

SEQ ID NO: 8600 - protein, 7 aa, synthetic construct
SKGPAPG

SEQ ID NO: 8601 - protein, 7 aa, synthetic construct
QDGVNNG

SEQ ID NO: 8602 - protein, 7 aa, synthetic construct
RGDRYGA

SEQ ID NO: 8603 - protein, 7 aa, synthetic construct
EAREMGS

SEQ ID NO: 8604 - protein, 7 aa, synthetic construct
KVPGEVA

SEQ ID NO: 8605 - protein, 7 aa, synthetic construct
TLVTRTG

SEQ ID NO: 8606 - protein, 7 aa, synthetic construct
EVSRNIS

SEQ ID NO: 8607 - protein, 7 aa, synthetic construct
VVSRIIS

SEQ ID NO: 8608 - protein, 7 aa, synthetic construct
STREHGG

SEQ ID NO: 8609 - protein, 7 aa, synthetic construct
SPNRPAP

SEQ ID NO: 8610 - protein, 7 aa, synthetic construct
FSCVGMT

SEQ ID NO: 8611 - protein, 7 aa, synthetic construct
QQVGALP

SEQ ID NO: 8612 - protein, 7 aa, synthetic construct
QPVGAHP

SEQ ID NO: 8613 - protein, 7 aa, synthetic construct
LISTTEN

SEQ ID NO: 8614 - protein, 6 aa, synthetic construct
GKMYGD

SEQ ID NO: 8615 - protein, 7 aa, synthetic construct
SQLNESH

SEQ ID NO: 8616 - protein, 7 aa, synthetic construct
NLQRLTL

SEQ ID NO: 8617 - protein, 7 aa, synthetic construct
TRVGSHA

SEQ ID NO: 8618 - protein, 7 aa, synthetic construct
SNGPATG

SEQ ID NO: 8619 - protein, 7 aa, synthetic construct
SNGPAHG

SEQ ID NO: 8620 - protein, 7 aa, synthetic construct
IMSQCRS

SEQ ID NO: 8621 - protein, 7 aa, synthetic construct
DHEINGD

SEQ ID NO: 8622 - protein, 7 aa, synthetic construct
GLTTQPP

SEQ ID NO: 8623 - protein, 7 aa, synthetic construct
GLTSQTP

SEQ ID NO: 8624 - protein, 7 aa, synthetic construct
VKPSTSV

SEQ ID NO: 8625 - protein, 7 aa, synthetic construct
IGSMSGN

SEQ ID NO: 8626 - protein, 7 aa, synthetic construct
RGSWLTR

SEQ ID NO: 8627 - protein, 6 aa, synthetic construct
AGSDQS

SEQ ID NO: 8628 - protein, 6 aa, synthetic construct
VNSGGL

SEQ ID NO: 8629 - protein, 7 aa, synthetic construct
LKETRVA

SEQ ID NO: 8630 - protein, 7 aa, synthetic construct
ATLMHVG

SEQ ID NO: 8631 - protein, 7 aa, synthetic construct
SSAAADA

SEQ ID NO: 8632 - protein, 7 aa, synthetic construct
SGLHSQE

SEQ ID NO: 8633 - protein, 7 aa, synthetic construct
LRSVPSG

SEQ ID NO: 8634 - protein, 7 aa, synthetic construct
RELNMKS

SEQ ID NO: 8635 - protein, 7 aa, synthetic construct
GSNSSKL

SEQ ID NO: 8636 - protein, 7 aa, synthetic construct
TRDADTD

SEQ ID NO: 8637 - protein, 7 aa, synthetic construct
ATPMHVG

SEQ ID NO: 8638 - protein, 7 aa, synthetic construct
GRGDHGE

SEQ ID NO: 8639 - protein, 7 aa, synthetic construct
SSFPAKY

SEQ ID NO: 8640 - protein, 7 aa, synthetic construct
KAAYSER

SEQ ID NO: 8641 - protein, 7 aa, synthetic construct
IMDTLLS

SEQ ID NO: 8642 - protein, 7 aa, synthetic construct
FMDTLIS

SEQ ID NO: 8643 - protein, 7 aa, synthetic construct
FDQKAHT

SEQ ID NO: 8644 - protein, 7 aa, synthetic construct
TGTEISP

SEQ ID NO: 8645 - protein, 7 aa, synthetic construct
SVTIHSG

SEQ ID NO: 8646 - protein, 7 aa, synthetic construct
DRRFISS

SEQ ID NO: 8647 - protein, 7 aa, synthetic construct
AVTTQPS

SEQ ID NO: 8648 - protein, 7 aa, synthetic construct
GLTRLTK

SEQ ID NO: 8649 - protein, 7 aa, synthetic construct
SPVQGEN

SEQ ID NO: 8650 - protein, 7 aa, synthetic construct
MMPRRAM

SEQ ID NO: 8651 - protein, 6 aa, synthetic construct
DSNGPT

SEQ ID NO: 8652 - protein, 7 aa, synthetic construct
GSSITLR

SEQ ID NO: 8653 - protein, 7 aa, synthetic construct
TTQGHKP

SEQ ID NO: 8654 - protein, 7 aa, synthetic construct
ITNNTRV

SEQ ID NO: 8655 - protein, 7 aa, synthetic construct
ERGDKLL

SEQ ID NO: 8656 - protein, 6 aa, synthetic construct
AYGDQS

SEQ ID NO: 8657 - protein, 7 aa, synthetic construct
IYKNAMT

SEQ ID NO: 8658 - protein, 7 aa, synthetic construct
DGITGSG

SEQ ID NO: 8659 - protein, 7 aa, synthetic construct
AKRMHVG

SEQ ID NO: 8660 - protein, 7 aa, synthetic construct
SRFPANY

SEQ ID NO: 8661 - protein, 7 aa, synthetic construct
GVLSSED

SEQ ID NO: 8662 - protein, 7 aa, synthetic construct
IGRKSGN

SEQ ID NO: 8663 - protein, 6 aa, synthetic construct
GWVVQS

SEQ ID NO: 8664 - protein, 7 aa, synthetic construct
TGGGGVM

SEQ ID NO: 8665 - protein, 7 aa, synthetic construct
SSGLAKG

SEQ ID NO: 8666 - protein, 7 aa, synthetic construct
SFHSVGS

SEQ ID NO: 8667 - protein, 7 aa, synthetic construct
LRVDYMD

SEQ ID NO: 8668 - protein, 7 aa, synthetic construct
STRMHVG

SEQ ID NO: 8669 - protein, 7 aa, synthetic construct
SNNLHLP

SEQ ID NO: 8670 - protein, 7 aa, synthetic construct
TVPGRLR

SEQ ID NO: 8671 - protein, 7 aa, synthetic construct
EGREYND

SEQ ID NO: 8672 - protein, 7 aa, synthetic construct
LMDTLLS

SEQ ID NO: 8673 - protein, 7 aa, synthetic construct
NRVSGGS

SEQ ID NO: 8674 - protein, 7 aa, synthetic construct
TRVDDTD

SEQ ID NO: 8675 - protein, 7 aa, synthetic construct
IGSTNVS

SEQ ID NO: 8676 - protein, 7 aa, synthetic construct
HQGGTGM

SEQ ID NO: 8677 - protein, 7 aa, synthetic construct
PPAAQSG

SEQ ID NO: 8678 - protein, 7 aa, synthetic construct
DGVNRPS

SEQ ID NO: 8679 - protein, 7 aa, synthetic construct
AGITCSG

SEQ ID NO: 8680 - protein, 7 aa, synthetic construct
YMDNRSM

SEQ ID NO: 8681 - protein, 7 aa, synthetic construct
TGVCSHA

SEQ ID NO: 8682 - protein, 7 aa, synthetic construct
RTERKGP

SEQ ID NO: 8683 - protein, 7 aa, synthetic construct
SSEILET

SEQ ID NO: 8684 - protein, 7 aa, synthetic construct
LGISYAS

SEQ ID NO: 8685 - protein, 7 aa, synthetic construct
ADEINGD

SEQ ID NO: 8686 - protein, 7 aa, synthetic construct
TSAYSER

SEQ ID NO: 8687 - protein, 7 aa, synthetic construct
RIEVDVG

SEQ ID NO: 8688 - protein, 7 aa, synthetic construct
MADRFQK

SEQ ID NO: 8689 - protein, 7 aa, synthetic construct
GWVEVES

SEQ ID NO: 8690 - protein, 7 aa, synthetic construct
SPNRQEP

SEQ ID NO: 8691 - protein, 7 aa, synthetic construct
FSSVVMT

SEQ ID NO: 8692 - protein, 7 aa, synthetic construct
QPLGALP

SEQ ID NO: 8693 - protein, 7 aa, synthetic construct
HQDSVIQ

SEQ ID NO: 8694 - protein, 7 aa, synthetic construct
LRVDYLE

SEQ ID NO: 8695 - protein, 7 aa, synthetic construct
ATRKHEG

SEQ ID NO: 8696 - protein, 7 aa, synthetic construct
SGLMGKA

SEQ ID NO: 8697 - protein, 7 aa, synthetic construct
KNGTLLS

SEQ ID NO: 8698 - protein, 7 aa, synthetic construct
RDSGKST

SEQ ID NO: 8699 - protein, 7 aa, synthetic construct
VKPSHSV

SEQ ID NO: 8700 - protein, 7 aa, synthetic construct
SRSVPLG

SEQ ID NO: 8701 - protein, 7 aa, synthetic construct
SVNAVPR

SEQ ID NO: 8702 - protein, 7 aa, synthetic construct
FHSQKIA

SEQ ID NO: 8703 - protein, 7 aa, synthetic construct
TTQGPKH

SEQ ID NO: 8704 - protein, 7 aa, synthetic construct
TLEGHKL

SEQ ID NO: 8705 - protein, 7 aa, synthetic construct
ISNNTRL

SEQ ID NO: 8706 - protein, 7 aa, synthetic construct
REPTLEQ

SEQ ID NO: 8707 - protein, 7 aa, synthetic construct
VVSRNNS

SEQ ID NO: 8708 - protein, 7 aa, synthetic construct
LNLVSTP

SEQ ID NO: 8709 - protein, 7 aa, synthetic construct
RFPSVGS

SEQ ID NO: 8710 - protein, 7 aa, synthetic construct
PSTHFPA

SEQ ID NO: 8711 - protein, 7 aa, synthetic construct
DKMVVIA

SEQ ID NO: 8712 - protein, 7 aa, synthetic construct
DGVHSPS

SEQ ID NO: 8713 - protein, 7 aa, synthetic construct
YEGPISG

SEQ ID NO: 8714 - protein, 7 aa, synthetic construct
STLESRI

SEQ ID NO: 8715 - protein, 7 aa, synthetic construct
RWVEVQS

SEQ ID NO: 8716 - protein, 7 aa, synthetic construct
EDGRINS

SEQ ID NO: 8717 - protein, 7 aa, synthetic construct
AYGTDQS

SEQ ID NO: 8718 - protein, 7 aa, synthetic construct
GWVELQS

SEQ ID NO: 8719 - protein, 7 aa, synthetic construct
VSNSCGL

SEQ ID NO: 8720 - protein, 7 aa, synthetic construct
KTGNVGS

SEQ ID NO: 8721 - protein, 7 aa, synthetic construct
TVSGVGT

SEQ ID NO: 8722 - protein, 7 aa, synthetic construct
STERKGQ

SEQ ID NO: 8723 - protein, 7 aa, synthetic construct
MMPRSEM

SEQ ID NO: 8724 - protein, 7 aa, synthetic construct
IMSHGRS

SEQ ID NO: 8725 - protein, 7 aa, synthetic construct
PTSHFPA

SEQ ID NO: 8726 - protein, 7 aa, synthetic construct
AVANVPK

SEQ ID NO: 8727 - protein, 7 aa, synthetic construct
ATRMHVA

SEQ ID NO: 8728 - protein, 7 aa, synthetic construct
SERGSSV

SEQ ID NO: 8729 - protein, 7 aa, synthetic construct
FHSEMIA

SEQ ID NO: 8730 - protein, 7 aa, synthetic construct
TADRYKM

SEQ ID NO: 8731 - protein, 7 aa, synthetic construct
RPVLGEN

SEQ ID NO: 8732 - protein, 7 aa, synthetic construct
LVISYAA

SEQ ID NO: 8733 - protein, 7 aa, synthetic construct
AVNTVPR

SEQ ID NO: 8734 - protein, 7 aa, synthetic construct
AVIAVPR

SEQ ID NO: 8735 - protein, 7 aa, synthetic construct
ALEINGD

SEQ ID NO: 8736 - protein, 7 aa, synthetic construct
GSSIPQR

SEQ ID NO: 8737 - protein, 7 aa, synthetic construct
SDRCSSV

SEQ ID NO: 8738 - protein, 7 aa, synthetic construct
QPVGDLP

SEQ ID NO: 8739 - protein, 7 aa, synthetic construct
PTMHGAG

SEQ ID NO: 8740 - protein, 7 aa, synthetic construct
ALGRGAT

SEQ ID NO: 8741 - protein, 7 aa, synthetic construct
GPRRAVG

SEQ ID NO: 8742 - protein, 7 aa, synthetic construct
YAGPIRG

SEQ ID NO: 8743 - protein, 7 aa, synthetic construct
STLVSRK

SEQ ID NO: 8744 - protein, 7 aa, synthetic construct
STAEHGG

SEQ ID NO: 8745 - protein, 7 aa, synthetic construct
NTGKVGS

SEQ ID NO: 8746 - protein, 7 aa, synthetic construct
PVNAVPR

SEQ ID NO: 8747 - protein, 7 aa, synthetic construct
RDSRKSS

SEQ ID NO: 8748 - protein, 7 aa, synthetic construct
AVNAVPH

SEQ ID NO: 8749 - protein, 7 aa, synthetic construct
VKRLQVP

SEQ ID NO: 8750 - protein, 7 aa, synthetic construct
LLDSWPD

SEQ ID NO: 8751 - protein, 7 aa, synthetic construct
LLSVPLG

SEQ ID NO: 8752 - protein, 7 aa, synthetic construct
QPVCALP

SEQ ID NO: 8753 - protein, 6 aa, synthetic construct
RSNDSH

SEQ ID NO: 8754 - protein, 7 aa, synthetic construct
AKMQYGD

SEQ ID NO: 8755 - protein, 7 aa, synthetic construct
AGITRSG

SEQ ID NO: 8756 - protein, 6 aa, synthetic construct
SVMGKA

SEQ ID NO: 8757 - protein, 7 aa, synthetic construct
TAPYSER

SEQ ID NO: 8758 - protein, 7 aa, synthetic construct
TVPAEVA

SEQ ID NO: 8759 - protein, 7 aa, synthetic construct
MVPGEVA

SEQ ID NO: 8760 - protein, 7 aa, synthetic construct
QKGPTSR

SEQ ID NO: 8761 - protein, 7 aa, synthetic construct
FSSLGMT

SEQ ID NO: 8762 - protein, 7 aa, synthetic construct
TNNLPLP

SEQ ID NO: 8763 - protein, 7 aa, synthetic construct
TGVGSQA

SEQ ID NO: 8764 - protein, 7 aa, synthetic construct
SSYPANY

SEQ ID NO: 8765 - protein, 7 aa, synthetic construct
MMTRSAM

SEQ ID NO: 8766 - protein, 7 aa, synthetic construct
HLEGGLG

SEQ ID NO: 8767 - protein, 7 aa, synthetic construct
HLARGLG

SEQ ID NO: 8768 - protein, 7 aa, synthetic construct
LGIGYAA

SEQ ID NO: 8769 - protein, 6 aa, synthetic construct
GQFPSA

SEQ ID NO: 8770 - protein, 7 aa, synthetic construct
IYQNAKT

SEQ ID NO: 8771 - protein, 7 aa, synthetic construct
QPVGALQ

SEQ ID NO: 8772 - protein, 7 aa, synthetic construct
ATQMHVG

SEQ ID NO: 8773 - protein, 7 aa, synthetic construct
ATRMHAG

SEQ ID NO: 8774 - protein, 7 aa, synthetic construct
MADRIQM

SEQ ID NO: 8775 - protein, 7 aa, synthetic construct
GWLEVQS

SEQ ID NO: 8776 - protein, 7 aa, synthetic construct
FMDTLLT

SEQ ID NO: 8777 - protein, 7 aa, synthetic construct
FSSVGIT

SEQ ID NO: 8778 - protein, 7 aa, synthetic construct
NKGTLLS

SEQ ID NO: 8779 - protein, 7 aa, synthetic construct
IMYQGRS

SEQ ID NO: 8780 - protein, 7 aa, synthetic construct
RDLGMEN

SEQ ID NO: 8781 - protein, 7 aa, synthetic construct
RPLQGEN

SEQ ID NO: 8782 - protein, 7 aa, synthetic construct
LGFSYAA

SEQ ID NO: 8783 - protein, 7 aa, synthetic construct
EVALHTG

SEQ ID NO: 8784 - protein, 7 aa, synthetic construct
YDRGSSV

SEQ ID NO: 8785 - protein, 7 aa, synthetic construct
KWSGESE

SEQ ID NO: 8786 - protein, 7 aa, synthetic construct
TSAAAVA

SEQ ID NO: 8787 - protein, 7 aa, synthetic construct
TAGLTTD

SEQ ID NO: 8788 - protein, 6 aa, synthetic construct
IGTYVS

SEQ ID NO: 8789 - protein, 7 aa, synthetic construct
ARITGSG

SEQ ID NO: 8790 - protein, 7 aa, synthetic construct
YMDTRSI

SEQ ID NO: 8791 - protein, 7 aa, synthetic construct
TAAYSES

SEQ ID NO: 8792 - protein, 7 aa, synthetic construct
AVTTQTR

SEQ ID NO: 8793 - protein, 7 aa, synthetic construct
VWVEVQS

SEQ ID NO: 8794 - protein, 7 aa, synthetic construct
RDSVKSS

SEQ ID NO: 8795 - protein, 7 aa, synthetic construct
SSVHEIA

SEQ ID NO: 8796 - protein, 7 aa, synthetic construct
KGSTYVS

SEQ ID NO: 8797 - protein, 7 aa, synthetic construct
TRVAETD

SEQ ID NO: 8798 - protein, 7 aa, synthetic construct
SVTITSG

SEQ ID NO: 8799 - protein, 7 aa, synthetic construct
SVTIPTG

SEQ ID NO: 8800 - protein, 7 aa, synthetic construct
ITNAIEY

SEQ ID NO: 8801 - protein, 7 aa, synthetic construct
RDRMNLQ

SEQ ID NO: 8802 - protein, 7 aa, synthetic construct
LKETWEA

SEQ ID NO: 8803 - protein, 7 aa, synthetic construct
DKKVVLA

SEQ ID NO: 8804 - protein, 7 aa, synthetic construct
LGQSSEG

SEQ ID NO: 8805 - protein, 7 aa, synthetic construct
FMDTLLY

SEQ ID NO: 8806 - protein, 7 aa, synthetic construct
NLQSQTL

SEQ ID NO: 8807 - protein, 7 aa, synthetic construct
RVMGMEN

SEQ ID NO: 8808 - protein, 7 aa, synthetic construct
LRISYAA

SEQ ID NO: 8809 - protein, 7 aa, synthetic construct
AVNAAPR

SEQ ID NO: 8810 - protein, 7 aa, synthetic construct
VDGMINS

SEQ ID NO: 8811 - protein, 7 aa, synthetic construct
SNNLPLQ

SEQ ID NO: 8812 - protein, 7 aa, synthetic construct
SKGGIGS

SEQ ID NO: 8813 - protein, 7 aa, synthetic construct
RSEVAVG

SEQ ID NO: 8814 - protein, 7 aa, synthetic construct
RGVVGNS

SEQ ID NO: 8815 - protein, 7 aa, synthetic construct
DLDVELL

SEQ ID NO: 8816 - protein, 7 aa, synthetic construct
GWVEVHS

SEQ ID NO: 8817 - protein, 7 aa, synthetic construct
FMDTLSS

SEQ ID NO: 8818 - protein, 7 aa, synthetic construct
NGGVGVM

SEQ ID NO: 8819 - protein, 7 aa, synthetic construct
TGGLGVM

SEQ ID NO: 8820 - protein, 7 aa, synthetic construct
TGGVGVI

SEQ ID NO: 8821 - protein, 7 aa, synthetic construct
ITNAIEI

SEQ ID NO: 8822 - protein, 7 aa, synthetic construct
ATRVHVG

SEQ ID NO: 8823 - protein, 7 aa, synthetic construct
VVNNTTW

SEQ ID NO: 8824 - protein, 6 aa, synthetic construct
GAQNAR

SEQ ID NO: 8825 - protein, 7 aa, synthetic construct
IVQLAPA

SEQ ID NO: 8826 - protein, 7 aa, synthetic construct
RLGFLTA

SEQ ID NO: 8827 - protein, 7 aa, synthetic construct
LWISYAA

SEQ ID NO: 8828 - protein, 7 aa, synthetic construct
AHEINGH

SEQ ID NO: 8829 - protein, 7 aa, synthetic construct
AREINGD

SEQ ID NO: 8830 - protein, 7 aa, synthetic construct
GSSNPLR

SEQ ID NO: 8831 - protein, 7 aa, synthetic construct
SSDHVIA

SEQ ID NO: 8832 - protein, 7 aa, synthetic construct
FQSEKIA

SEQ ID NO: 8833 - protein, 7 aa, synthetic construct
TVRGEVA

SEQ ID NO: 8834 - protein, 7 aa, synthetic construct
RNEVAVG

SEQ ID NO: 8835 - protein, 7 aa, synthetic construct
ISNNKRV

SEQ ID NO: 8836 - protein, 7 aa, synthetic construct
HSEDRGT

SEQ ID NO: 8837 - protein, 7 aa, synthetic construct
AWVEVQS

SEQ ID NO: 8838 - protein, 7 aa, synthetic construct
GRGMGLR

SEQ ID NO: 8839 - protein, 7 aa, synthetic construct
NKDGGLK

SEQ ID NO: 8840 - protein, 7 aa, synthetic construct
QESDSSP

SEQ ID NO: 8841 - protein, 7 aa, synthetic construct
HRVDYLD

SEQ ID NO: 8842 - protein, 7 aa, synthetic construct
HLGGSGM

SEQ ID NO: 8843 - protein, 7 aa, synthetic construct
PSSNFPA

SEQ ID NO: 8844 - protein, 7 aa, synthetic construct
PTRMHVG

SEQ ID NO: 8845 - protein, 6 aa, synthetic construct
LRVDLD

SEQ ID NO: 8846 - protein, 7 aa, synthetic construct
DSRYISS

SEQ ID NO: 8847 - protein, 7 aa, synthetic construct
ERQSDKG

SEQ ID NO: 8848 - protein, 7 aa, synthetic construct
GKMHYGD

SEQ ID NO: 8849 - protein, 7 aa, synthetic construct
YHERDPL

SEQ ID NO: 8850 - protein, 7 aa, synthetic construct
LGAQKAR

SEQ ID NO: 8851 - protein, 7 aa, synthetic construct
TADRNQM

SEQ ID NO: 8852 - protein, 7 aa, synthetic construct
RDGRLAV

SEQ ID NO: 8853 - protein, 7 aa, synthetic construct
SPQHTQG

SEQ ID NO: 8854 - protein, 7 aa, synthetic construct
SSVNLET

SEQ ID NO: 8855 - protein, 7 aa, synthetic construct
IGGTPHS

SEQ ID NO: 8856 - protein, 7 aa, synthetic construct
RDTGKSS

SEQ ID NO: 8857 - protein, 7 aa, synthetic construct
AVNAVPC

SEQ ID NO: 8858 - protein, 7 aa, synthetic construct
AHQINGD

SEQ ID NO: 8859 - protein, 7 aa, synthetic construct
VQRLKVP

SEQ ID NO: 8860 - protein, 7 aa, synthetic construct
SNNLPHP

SEQ ID NO: 8861 - protein, 7 aa, synthetic construct
SHRGSSV

SEQ ID NO: 8862 - protein, 7 aa, synthetic construct
FHSEKIS

SEQ ID NO: 8863 - protein, 7 aa, synthetic construct
TTQRPKP

SEQ ID NO: 8864 - protein, 7 aa, synthetic construct
TAAYSEG

SEQ ID NO: 8865 - protein, 7 aa, synthetic construct
TVPVEVA

SEQ ID NO: 8866 - protein, 6 aa, synthetic construct
INNTRV

SEQ ID NO: 8867 - protein, 7 aa, synthetic construct
QNGPPSR

SEQ ID NO: 8868 - protein, 7 aa, synthetic construct
RELNMMT

SEQ ID NO: 8869 - protein, 7 aa, synthetic construct
LFGWVAA

SEQ ID NO: 8870 - protein, 7 aa, synthetic construct
EGLVHTV

SEQ ID NO: 8871 - protein, 7 aa, synthetic construct
GGVEVQS

SEQ ID NO: 8872 - protein, 7 aa, synthetic construct
YMDTLLS

SEQ ID NO: 8873 - protein, 7 aa, synthetic construct
LHLVTTP

SEQ ID NO: 8874 - protein, 7 aa, synthetic construct
LHLVSPP

SEQ ID NO: 8875 - protein, 7 aa, synthetic construct
SETIPSG

SEQ ID NO: 8876 - protein, 7 aa, synthetic construct
LKETSVA

SEQ ID NO: 8877 - protein, 7 aa, synthetic construct
DSRFNSS

SEQ ID NO: 8878 - protein, 7 aa, synthetic construct
GRGDNGV

SEQ ID NO: 8879 - protein, 7 aa, synthetic construct
GPSRDVG

SEQ ID NO: 8880 - protein, 7 aa, synthetic construct
GDYGAIA

SEQ ID NO: 8881 - protein, 7 aa, synthetic construct
YMDTPSM

SEQ ID NO: 8882 - protein, 7 aa, synthetic construct
YMYTRSM

SEQ ID NO: 8883 - protein, 7 aa, synthetic construct
RRGVSNL

SEQ ID NO: 8884 - protein, 7 aa, synthetic construct
RPVHGEN

SEQ ID NO: 8885 - protein, 7 aa, synthetic construct
LGNSYAA

SEQ ID NO: 8886 - protein, 7 aa, synthetic construct
DSNGIPT

SEQ ID NO: 8887 - protein, 7 aa, synthetic construct
ASSIPLR

SEQ ID NO: 8888 - protein, 7 aa, synthetic construct
SHATADI

SEQ ID NO: 8889 - protein, 7 aa, synthetic construct
TTHGPKP

SEQ ID NO: 8890 - protein, 7 aa, synthetic construct
TTQGPKT

SEQ ID NO: 8891 - protein, 5 aa, synthetic construct
TGVRS

SEQ ID NO: 8892 - protein, 7 aa, synthetic construct
ISKNTRV

SEQ ID NO: 8893 - protein, 7 aa, synthetic construct
LFGGVAV

SEQ ID NO: 8894 - protein, 7 aa, synthetic construct
SQNRPEP

SEQ ID NO: 8895 - protein, 7 aa, synthetic construct
FSSVGMS

SEQ ID NO: 8896 - protein, 7 aa, synthetic construct
NYQNAMT

SEQ ID NO: 8897 - protein, 7 aa, synthetic construct
MGAQNAR

SEQ ID NO: 8898 - protein, 7 aa, synthetic construct
HQASVNQ

SEQ ID NO: 8899 - protein, 7 aa, synthetic construct
PGMKKSI

SEQ ID NO: 8900 - protein, 7 aa, synthetic construct
LSVDYLD

SEQ ID NO: 8901 - protein, 6 aa, synthetic construct
LRVDYD

SEQ ID NO: 8902 - protein, 7 aa, synthetic construct
AGNTGSG

SEQ ID NO: 8903 - protein, 7 aa, synthetic construct
STIVSRI

SEQ ID NO: 8904 - protein, 7 aa, synthetic construct
SVMMGKA

SEQ ID NO: 8905 - protein, 7 aa, synthetic construct
TGVASHA

SEQ ID NO: 8906 - protein, 7 aa, synthetic construct
SNGPDPG

SEQ ID NO: 8907 - protein, 7 aa, synthetic construct
SDSGKSS

SEQ ID NO: 8908 - protein, 7 aa, synthetic construct
RTVQGEN

SEQ ID NO: 8909 - protein, 7 aa, synthetic construct
RPVQGEI

SEQ ID NO: 8910 - protein, 7 aa, synthetic construct
VQSLQVP

SEQ ID NO: 8911 - protein, 7 aa, synthetic construct
SSVQVIA

SEQ ID NO: 8912 - protein, 7 aa, synthetic construct
TLVSRTR

SEQ ID NO: 8913 - protein, 6 aa, synthetic construct
RGVVVN

SEQ ID NO: 8914 - protein, 7 aa, synthetic construct
AGLVNTV

SEQ ID NO: 8915 - protein, 7 aa, synthetic construct
GRGDGTE

SEQ ID NO: 8916 - protein, 7 aa, synthetic construct
VLDVEHL

SEQ ID NO: 8917 - protein, 7 aa, synthetic construct
FQNTSRA

SEQ ID NO: 8918 - protein, 7 aa, synthetic construct
KGMDMGT

SEQ ID NO: 8919 - protein, 7 aa, synthetic construct
NKDGGLI

SEQ ID NO: 8920 - protein, 7 aa, synthetic construct
NMLSTVT

SEQ ID NO: 8921 - protein, 7 aa, synthetic construct
TRGVGVM

SEQ ID NO: 8922 - protein, 7 aa, synthetic construct
TTKLLEI

SEQ ID NO: 8923 - protein, 6 aa, synthetic construct
HASVIQ

SEQ ID NO: 8924 - protein, 7 aa, synthetic construct
ERLSEKG

SEQ ID NO: 8925 - protein, 7 aa, synthetic construct
DNAKEAS

SEQ ID NO: 8926 - protein, 7 aa, synthetic construct
ATRMHVE

SEQ ID NO: 8927 - protein, 7 aa, synthetic construct
AGITGSV

SEQ ID NO: 8928 - protein, 7 aa, synthetic construct
GLNKNAT

SEQ ID NO: 8929 - protein, 7 aa, synthetic construct
GKMQYWD

SEQ ID NO: 8930 - protein, 7 aa, synthetic construct
YHERVQL

SEQ ID NO: 8931 - protein, 7 aa, synthetic construct
SVLMWKA

SEQ ID NO: 8932 - protein, 7 aa, synthetic construct
NKGNVGS

SEQ ID NO: 8933 - protein, 7 aa, synthetic construct
TGVGSHE

SEQ ID NO: 8934 - protein, 6 aa, synthetic construct
SVILET

SEQ ID NO: 8935 - protein, 7 aa, synthetic construct
MGISYAA

SEQ ID NO: 8936 - protein, 6 aa, synthetic construct
AHINGD

SEQ ID NO: 8937 - protein, 6 aa, synthetic construct
SYTTFA

SEQ ID NO: 8938 - protein, 7 aa, synthetic construct
LRSVALG

SEQ ID NO: 8939 - protein, 7 aa, synthetic construct
FRSVPLG

SEQ ID NO: 8940 - protein, 7 aa, synthetic construct
TGTTQTA

SEQ ID NO: 8941 - protein, 7 aa, synthetic construct
RGVHSVL

SEQ ID NO: 8942 - protein, 7 aa, synthetic construct
REPTHEL

SEQ ID NO: 8943 - protein, 7 aa, synthetic construct
GWVEVQT

SEQ ID NO: 8944 - protein, 7 aa, synthetic construct
GGSSHAM

SEQ ID NO: 8945 - protein, 7 aa, synthetic construct
VSDSGGL

SEQ ID NO: 8946 - protein, 7 aa, synthetic construct
FMDTQLS

SEQ ID NO: 8947 - protein, 7 aa, synthetic construct
LHLVSKP

SEQ ID NO: 8948 - protein, 7 aa, synthetic construct
TAGVGVM

SEQ ID NO: 8949 - protein, 7 aa, synthetic construct
TVIGEGT

SEQ ID NO: 8950 - protein, 7 aa, synthetic construct
HQASLIQ

SEQ ID NO: 8951 - protein, 7 aa, synthetic construct
PTVGRES

SEQ ID NO: 8952 - protein, 7 aa, synthetic construct
PSMHRAG

SEQ ID NO: 8953 - protein, 7 aa, synthetic construct
RSNDRHL

SEQ ID NO: 8954 - protein, 7 aa, synthetic construct
LKETWVE

SEQ ID NO: 8955 - protein, 7 aa, synthetic construct
ERLSDKC

SEQ ID NO: 8956 - protein, 7 aa, synthetic construct
AIANSHI

SEQ ID NO: 8957 - protein, 7 aa, synthetic construct
TVPREVA

SEQ ID NO: 8958 - protein, 7 aa, synthetic construct
DSRLISS

SEQ ID NO: 8959 - protein, 7 aa, synthetic construct
TADRYQI

SEQ ID NO: 8960 - protein, 7 aa, synthetic construct
ALTTQPR

SEQ ID NO: 8961 - protein, 7 aa, synthetic construct
GLQFPRA

SEQ ID NO: 8962 - protein, 7 aa, synthetic construct
SNNFPLP

SEQ ID NO: 8963 - protein, 7 aa, synthetic construct
LQLVSTP

SEQ ID NO: 8964 - protein, 7 aa, synthetic construct
RESGKSS

SEQ ID NO: 8965 - protein, 7 aa, synthetic construct
TFDASGG

SEQ ID NO: 8966 - protein, 7 aa, synthetic construct
LFGRVAA

SEQ ID NO: 8967 - protein, 7 aa, synthetic construct
FIDTLLS

SEQ ID NO: 8968 - protein, 7 aa, synthetic construct
LSNSGGL

SEQ ID NO: 8969 - protein, 7 aa, synthetic construct
VVNNTSC

SEQ ID NO: 8970 - protein, 7 aa, synthetic construct
SNGPAPR

SEQ ID NO: 8971 - protein, 7 aa, synthetic construct
IISQGRS

SEQ ID NO: 8972 - protein, 7 aa, synthetic construct
RVLGMET

SEQ ID NO: 8973 - protein, 7 aa, synthetic construct
ESGDNLL

SEQ ID NO: 8974 - protein, 7 aa, synthetic construct
TGGVRVM

SEQ ID NO: 8975 - protein, 7 aa, synthetic construct
LKETCVA

SEQ ID NO: 8976 - protein, 7 aa, synthetic construct
SVLIGKA

SEQ ID NO: 8977 - protein, 7 aa, synthetic construct
TLVSRSG

SEQ ID NO: 8978 - protein, 6 aa, synthetic construct
GVEVQS

SEQ ID NO: 8979 - protein, 7 aa, synthetic construct
TGGVGLM

SEQ ID NO: 8980 - protein, 7 aa, synthetic construct
VNPSPSV

SEQ ID NO: 8981 - protein, 6 aa, synthetic construct
EGREKD

SEQ ID NO: 8982 - protein, 7 aa, synthetic construct
LRVEYLD

SEQ ID NO: 8983 - protein, 7 aa, synthetic construct
TVIGVGR

SEQ ID NO: 8984 - protein, 7 aa, synthetic construct
SSLILET

SEQ ID NO: 8985 - protein, 7 aa, synthetic construct
FHSENIA

SEQ ID NO: 8986 - protein, 7 aa, synthetic construct
STGDHGG

SEQ ID NO: 8987 - protein, 7 aa, synthetic construct
GKMQYRD

SEQ ID NO: 8988 - protein, 7 aa, synthetic construct
GKIQYGD

SEQ ID NO: 8989 - protein, 7 aa, synthetic construct
SDRGSSL

SEQ ID NO: 8990 - protein, 6 aa, synthetic construct
LLDSPA

SEQ ID NO: 8991 - protein, 7 aa, synthetic construct
TLLSRTG

SEQ ID NO: 8992 - protein, 7 aa, synthetic construct
GSSIPLS

SEQ ID NO: 8993 - protein, 7 aa, synthetic construct
AYRSDQS

SEQ ID NO: 8994 - protein, 7 aa, synthetic construct
KGMVIGT

SEQ ID NO: 8995 - protein, 7 aa, synthetic construct
HLGGTGI

SEQ ID NO: 8996 - protein, 7 aa, synthetic construct
DKMLVLA

SEQ ID NO: 8997 - protein, 7 aa, synthetic construct
SVIGVGT

SEQ ID NO: 8998 - protein, 7 aa, synthetic construct
NNGTFLS

SEQ ID NO: 8999 - protein, 7 aa, synthetic construct
TVIGLGT

SEQ ID NO: 9000 - protein, 7 aa, synthetic construct
AVTAQPR

SEQ ID NO: 9001 - RNA, 21 nt, synthetic construct
  source 1..21: mol_type = other RNA
  ncRNA 1..21: ncRNA_class = other; note = mRNA
gctacacgaatgcacgtggga

SEQ ID NO: 9002 - DNA, 21 bp, synthetic construct
  source 1..21: mol_type = other DNA
accggcggcgtcggggtaatg

SEQ ID NO: 9003 - RNA, 21 nt, synthetic construct
  source 1..21: mol_type = other RNA
  ncRNA 1..21: ncRNA_class = other; note = mRNA
gctggtattacgggtagtggt

SEQ ID NO: 9004 - DNA, 21 bp, synthetic construct
  source 1..21: mol_type = other DNA
ggtaagatgcagtatggggat

SEQ ID NO: 9005 - DNA, 21 bp, synthetic construct
  source 1..21: mol_type = other DNA
caaccagtcggtgctctccca

SEQ ID NO: 9006 - RNA, 21 nt, synthetic construct
  source 1..21: mol_type = other RNA
  ncRNA 1..21: ncRNA_class = other; note = mRNA
tacatggacacccgttccatg

SEQ ID NO: 9007 - DNA, 21 bp, synthetic construct
  source 1..21: mol_type = other DNA
gggctgattaagaatgctact

SEQ ID NO: 9008 - RNA, 21 nt, synthetic construct
  source 1..21: mol_type = other RNA
  ncRNA 1..21: ncRNA_class = other; note = mRNA
actcgtgttgctgatacggat

SEQ ID NO: 9009 - DNA, 21 bp, synthetic construct
  source 1..21: mol_type = other DNA
actgtgattggggtggggacg

SEQ ID NO: 9010 - DNA, 21 bp, synthetic construct
  source 1..21: mol_type = other DNA
ccctcatctcacttccccgca

SEQ ID NO: 9011 - DNA, 21 bp, synthetic construct
  source 1..21: mol_type = other DNA
gagcggctgagtgataagggt

SEQ ID NO: 9012 - RNA, 21 nt, synthetic construct
  source 1..21: mol_type = other RNA
  ncRNA 1..21: ncRNA_class = other; note = mRNA
tcggttttgatggggaaggct

SEQ ID NO: 9013 - DNA, 21 bp, synthetic construct
  source 1..21: mol_type = other DNA
ggcgtaacataccaaacgcga

SEQ ID NO: 9014 - RNA, 21 nt, synthetic construct
  source 1..21: mol_type = other RNA
  ncRNA 1..21: ncRNA_class = other; note = mRNA
aaggggatggttatgggtact

SEQ ID NO: 9015 - DNA, 21 bp, synthetic construct
  source 1..21: mol_type = other DNA
ggcaacggagttatctctggt

SEQ ID NO: 9016 - DNA, 21 bp, synthetic construct
  source 1..21: mol_type = other DNA
caccaagccagcgttatccaa

SEQ ID NO: 9017 - DNA, 21 bp, synthetic construct
  source 1..21: mol_type = other DNA
atttatcagaatgctatgact

SEQ ID NO: 9018 - DNA, 21 bp, synthetic construct
  source 1..21: mol_type = other DNA
aacagcgtaagcggaggctca

SEQ ID NO: 9019 - DNA, 21 bp, synthetic construct
  source 1..21: mol_type = other DNA
cgtagtaatgatagtcatttg

SEQ ID NO: 9020 - DNA, 21 bp, synthetic construct
  source 1..21: mol_type = other DNA
ggatgggtcgaagttcaaagt

SEQ ID NO: 9021 - DNA, 21 bp, synthetic construct
  source 1..21: mol_type = other DNA
gacagccggttcatcagttcc

SEQ ID NO: 9022 - DNA, 21 bp, synthetic construct
  source 1..21: mol_type = other DNA
cttcgtgtggattatttggat

SEQ ID NO: 9023 - DNA, 21 bp, synthetic construct
  source 1..21: mol_type = other DNA
gacaaaatggtggtccttgcc

SEQ ID NO: 9024 - DNA, 21 bp, synthetic construct
  source 1..21: mol_type = other DNA
gcagtcaccacgcaaccaagg

SEQ ID NO: 9025 - RNA, 21 nt, synthetic construct
  source 1..21: mol_type = other RNA
  ncRNA 1..21: ncRNA_class = other; note = mRNA
tctgacttacaacgcgtgaca

SEQ ID NO: 9026 - DNA, 21 bp, synthetic construct
  source 1..21: mol_type = other DNA
cccggaatgaaaatgtccata

SEQ ID NO: 9027 - DNA, 21 bp, synthetic construct
  source 1..21: mol_type = other DNA
cgtccggtgcagggtgagaat

SEQ ID NO: 9028 - DNA, 21 bp, synthetic construct
  source 1..21: mol_type = other DNA
aagtggagtggtgtgtcggag

SEQ ID NO: 9029 - RNA, 21 nt, synthetic construct
  source 1..21: mol_type = other RNA
  ncRNA 1..21: ncRNA_class = other; note = mRNA
tcgtctgctgctgctgttgct

SEQ ID NO: 9030 - DNA, 21 bp, synthetic construct
  source 1..21: mol_type = other DNA
gtctcacacaacatcgcctac

SEQ ID NO: 9031 - DNA, 21 bp, synthetic construct
  source 1..21: mol_type = other DNA
atcaccaacgctatagaattc

SEQ ID NO: 9032 - RNA, 21 nt, synthetic construct
  source 1..21: mol_type = other RNA
  ncRNA 1..21: ncRNA_class = other; note = mRNA
gcggttaatgctgtgccgcgt

SEQ ID NO: 9033 - DNA, 21 bp, synthetic construct
  source 1..21: mol_type = other DNA
tttagttctgtgggtatgacg

SEQ ID NO: 9034 - DNA, 21 bp, synthetic construct
  source 1..21: mol_type = other DNA
ttgcgttctgttcctttgggt

SEQ ID NO: 9035 - DNA, 21 bp, synthetic construct
  source 1..21: mol_type = other DNA
acggctgcgtattctgagagg

SEQ ID NO: 9036 - DNA, 21 bp, synthetic construct
  source 1..21: mol_type = other DNA
acggttcctggggaggttgcg

SEQ ID NO: 9037 - RNA, 21 nt, synthetic construct
  source 1..21: mol_type = other RNA
  ncRNA 1..21: ncRNA_class = other; note = mRNA
gctcacgaaataaacggggac

SEQ ID NO: 9038 - DNA, 21 bp, synthetic construct
  source 1..21: mol_type = other DNA
ctttttggtggggttgctgcg

SEQ ID NO: 9039 - DNA, 21 bp, synthetic construct
  source 1..21: mol_type = other DNA
tttcatagtgagaagattgct

SEQ ID NO: 9040 - RNA, 21 nt, synthetic construct
  source 1..21: mol_type = other RNA
  ncRNA 1..21: ncRNA_class = other; note = mRNA
ctggggattagttatgcggcg

SEQ ID NO: 9041 - DNA, 21 bp, synthetic construct
  source 1..21: mol_type = other DNA
gtgtcgaattcgggtggtctt

SEQ ID NO: 9042 - DNA, 21 bp, synthetic construct
  source 1..21: mol_type = other DNA
tctgatcggggtagtagtgtg

SEQ ID NO: 9043 - DNA, 21 bp, synthetic construct
  source 1..21: mol_type = other DNA
atctcaaacaacacacgagtg

SEQ ID NO: 9044 - DNA, 21 bp, synthetic construct
  source 1..21: mol_type = other DNA
actggagtcggtagccacgca

SEQ ID NO: 9045 - DNA, 21 bp, synthetic construct
  source 1..21: mol_type = other DNA
tcttacaccacatcgttcgcg

SEQ ID NO: 9046 - RNA, 21 nt, synthetic construct
  source 1..21: mol_type = other RNA
  ncRNA 1..21: ncRNA_class = other; note = mRNA
attatgtctcagggtcggagt

SEQ ID NO: 9047 - DNA, 21 bp, synthetic construct
  source 1..21: mol_type = other DNA
tccactggagaacacggtggc

SEQ ID NO: 9048 - DNA, 21 bp, synthetic construct
  source 1..21: mol_type = other DNA
ttgcatcttgtttcgacgcct

SEQ ID NO: 9049 - DNA, 21 bp, synthetic construct
  source 1..21: mol_type = other DNA
actctggtgtctaggactggg

SEQ ID NO: 9050 - DNA, 21 bp, synthetic construct
  source 1..21: mol_type = other DNA
gcttatgggtcggatcagtcg

SEQ ID NO: 9051 - DNA, 21 bp, synthetic construct
  source 1..21: mol_type = other DNA
cggggggtcgtggttaactcg

SEQ ID NO: 9052 - DNA, 21 bp, synthetic construct
  source 1..21: mol_type = other DNA
attgtgcaggtggctcctgct

SEQ ID NO: 9053 - DNA, 21 bp, synthetic construct
  source 1..21: mol_type = other DNA
aggattgaggtggctgttggt

SEQ ID NO: 9054 - DNA, 21 bp, synthetic construct
  source 1..21: mol_type = other DNA
attggtcgtatgagtggtaat

SEQ ID NO: 9055 - RNA, 21 nt, synthetic construct
  source 1..21: mol_type = other RNA
  ncRNA 1..21: ncRNA_class = other; note = mRNA
cgtgattctgggaagagttcg

SEQ ID NO: 9056 - DNA, 21 bp, synthetic construct
  source 1..21: mol_type = other DNA
agctcggtaatcctggaaacg

SEQ ID NO: 9057 - DNA, 21 bp, synthetic construct
  source 1..21: mol_type = other DNA
gagggtcgtgagtataaggat

SEQ ID NO: 9058 - DNA, 21 bp, synthetic construct
  source 1..21: mol_type = other DNA
aataatggtacgttgctttct

SEQ ID NO: 9059 - DNA, 21 bp, synthetic construct
  source 1..21: mol_type = other DNA
agtaatggtcctgctcctggg

SEQ ID NO: 9060 - DNA, 21 bp, synthetic construct
  source 1..21: mol_type = other DNA
gaaggcgcactacacacgggc

SEQ ID NO: 9061 - DNA, 21 bp, synthetic construct
  source 1..21: mol_type = other DNA
gtaaaaccatcgccctcagtg

SEQ ID NO: 9062 - DNA, 21 bp, synthetic construct
  source 1..21: mol_type = other DNA
acgacgcagggtcctaagcct

SEQ ID NO: 9063 - DNA, 21 bp, synthetic construct
  source 1..21: mol_type = other DNA
ttactagactcatggcctgcc

SEQ ID NO: 9064 - DNA, 21 bp, synthetic construct
  source 1..21: mol_type = other DNA
gcgggtcttgttcatacggtt

SEQ ID NO: 9065 - DNA, 21 bp, synthetic construct
  source 1..21: mol_type = other DNA
ggattacaattccccagcgcc

SEQ ID NO: 9066 - DNA, 21 bp, synthetic construct
  source 1..21: mol_type = other DNA
agtagttttcctgctaattat

SEQ ID NO: 9067 - DNA, 21 bp, synthetic construct
  source 1..21: mol_type = other DNA
cacctggcgggcggtctcggg

SEQ ID NO: 9068 - DNA, 21 bp, synthetic construct
  source 1..21: mol_type = other DNA
tccaacaacttgcctctcccg

SEQ ID NO: 9069 - DNA, 21 bp, synthetic construct
  source 1..21: mol_type = other DNA
gtgcagcgtttgcaggttccg

SEQ ID NO: 9070 - DNA, 21 bp, synthetic construct
  source 1..21: mol_type = other DNA
ggtcctagtcgtgctgtgggt

SEQ ID NO: 9071 - RNA, 21 nt, synthetic construct
  source 1..21: mol_type = other RNA
  ncRNA 1..21: ncRNA_class = other; note = mRNA
gttactaagagtgagacgatg

SEQ ID NO: 9072 - RNA, 21 nt, synthetic construct
  source 1..21: mol_type = other RNA
  ncRNA 1..21: ncRNA_class = other; note = mRNA
gtggttggtatgattaatagt

SEQ ID NO: 9073 - DNA, 21 bp, synthetic construct
  source 1..21: mol_type = other DNA
gggagttcgattccgctgagg

SEQ ID NO: 9074 - DNA, 21 bp, synthetic construct
  source 1..21: mol_type = other DNA
gagaggggtgataatttgctt

SEQ ID NO: 9075 - DNA, 21 bp, synthetic construct
  source 1..21: mol_type = other DNA
gtggtttctaggaatattagt

SEQ ID NO: 9076 - DNA, 21 bp, synthetic construct
  source 1..21: mol_type = other DNA
acttttgatgctaggggtggt

SEQ ID NO: 9077 - DNA, 21 bp, synthetic construct
  source 1..21: mol_type = other DNA
aatacgggtaatgttggtagt

SEQ ID NO: 9078 - DNA, 21 bp, synthetic construct
  source 1..21: mol_type = other DNA
ggtcttacgtctcagcctcct

SEQ ID NO: 9079 - DNA, 21 bp, synthetic construct
  source 1..21: mol_type = other DNA
tctaatcagtctacgagtcgg

SEQ ID NO: 9080 - RNA, 21 nt, synthetic construct
  source 1..21: mol_type = other RNA
  ncRNA 1..21: ncRNA_class = other; note = mRNA
ggtagtagtgggtcggtgagg

SEQ ID NO: 9081 - DNA, 21 bp, synthetic construct
  source 1..21: mol_type = other DNA
gggaggggggatgggactgcg

SEQ ID NO: 9082 - DNA, 21 bp, synthetic construct
  source 1..21: mol_type = other DNA
ttcatggacactctattatcc

SEQ ID NO: 9083 - DNA, 21 bp, synthetic construct
  source 1..21: mol_type = other DNA
ccttctatgcatggtgctggg

SEQ ID NO: 9084 - DNA, 21 bp, synthetic construct
  source 1..21: mol_type = other DNA
ataggatcgacttacgtatca

SEQ ID NO: 9085 - DNA, 21 bp, synthetic construct
  source 1..21: mol_type = other DNA
tcgctggaggggcataagctg

SEQ ID NO: 9086 - DNA, 21 bp, synthetic construct
  source 1..21: mol_type = other DNA
ctgttttcgactactgagaat

SEQ ID NO: 9087 - DNA, 21 bp, synthetic construct
  source 1..21: mol_type = other DNA
tctccgaatcgtccggagcct

SEQ ID NO: 9088 - DNA, 21 bp, synthetic construct
  source 1..21: mol_type = other DNA
ggtgtttacggagctatagcc

SEQ ID NO: 9089 - RNA, 21 nt, synthetic construct
  source 1..21: mol_type = other RNA
  ncRNA 1..21: ncRNA_class = other; note = mRNA
atggctgatcgttttcagatg

SEQ ID NO: 9090 - DNA, 21 bp, synthetic construct
  source 1..21: mol_type = other DNA
gacggacaagccggagtaagc

SEQ ID NO: 9091 - RNA, 21 nt, synthetic construct
  source 1..21: mol_type = other RNA
  ncRNA 1..21: ncRNA_class = other; note = mRNA
gttcttgatgtggagcttctg

SEQ ID NO: 9092 - DNA, 21 bp, synthetic construct
  source 1..21: mol_type = other DNA
tccatgggcggtatcggctct

SEQ ID NO: 9093 - DNA, 21 bp, synthetic construct
  source 1..21: mol_type = other DNA
caagtcggagtcaacaacggc

SEQ ID NO: 9094 - RNA, 21 nt, synthetic construct
  source 1..21: mol_type = other RNA
  ncRNA 1..21: ncRNA_class = other; note = mRNA
gtggatggtaggattaatagt

SEQ ID NO: 9095 - DNA, 21 bp, synthetic construct
  source 1..21: mol_type = other DNA
aatctgcagagtctgactctg

SEQ ID NO: 9096 - DNA, 21 bp, synthetic construct
  source 1..21: mol_type = other DNA
cgtggtgatagttatggggcg

SEQ ID NO: 9097 - DNA, 21 bp, synthetic construct
  source 1..21: mol_type = other DNA
tcttcggttcatgtgattgcg

SEQ ID NO: 9098 - DNA, 21 bp, synthetic construct
  source 1..21: mol_type = other DNA
agtactgagaggaagggtccg

SEQ ID NO: 9099 - DNA, 21 bp, synthetic construct
  source 1..21: mol_type = other DNA
ccatctgtcgggcgggaaagt

SEQ ID NO: 9100 - DNA, 21 bp, synthetic construct
  source 1..21: mol_type = other DNA
atcggcggcaccccgctctct

SEQ ID NO: 9101 - DNA, 21 bp, synthetic construct
  source 1..21: mol_type = other DNA
agtgtgacgattccttctggg

SEQ ID NO: 9102 - DNA, 21 bp, synthetic construct
  source 1..21: mol_type = other DNA
catctggggggtactggtatg

SEQ ID NO: 9103 - DNA, 21 bp, synthetic construct
  source 1..21: mol_type = other DNA
cgcctaggcttccttaccgac

SEQ ID NO: 9104 - DNA, 21 bp, synthetic construct
  source 1..21: mol_type = other DNA
gtggctagggagatggggagt

SEQ ID NO: 9105 - DNA, 21 bp, synthetic construct
  source 1..21: mol_type = other DNA
tcacacgccactgctgaccta

SEQ ID NO: 9106 - DNA, 21 bp, synthetic construct
  source 1..21: mol_type = other DNA
agtgatgggcggctggcggtt

SEQ ID NO: 9107 - RNA, 21 nt, synthetic construct
  source 1..21: mol_type = other RNA
  ncRNA 1..21: ncRNA_class = other; note = mRNA
tcgaccctcgtatcacggata

SEQ ID NO: 9108 - RNA, 21 nt, synthetic construct
  source 1..21: mol_type = other RNA
  ncRNA 1..21: ncRNA_class = other; note = mRNA
accggcgcaagagacagttta

SEQ ID NO: 9109 - DNA, 21 bp, synthetic construct
  source 1..21: mol_type = other DNA
ctaaaagaaacatgggtagca

SEQ ID NO: 9110 - DNA, 21 bp, synthetic construct
  source 1..21: mol_type = other DNA
cgtgagcctactcttgagctg

SEQ ID NO: 9111 - RNA, 21 nt, synthetic construct
  source 1..21: mol_type = other RNA
  ncRNA 1..21: ncRNA_class = other; note = mRNA
accgcagaccgctaccaaatg

SEQ ID NO: 9112 - RNA, 21 nt, synthetic construct
  source 1..21: mol_type = other RNA
  ncRNA 1..21: ncRNA_class = other; note = mRNA
cgagtcctgggtatggaaaac

SEQ ID NO: 9113 - DNA, 21 bp, synthetic construct
  source 1..21: mol_type = other DNA
agttcgggtctggcgaatggt

SEQ ID NO: 9114 - DNA, 21 bp, synthetic construct
  source 1..21: mol_type = other DNA
gactcgaacggcttaccgaca

SEQ ID NO: 9115 - DNA, 21 bp, synthetic construct
  source 1..21: mol_type = other DNA
gatgatcgtagtggtgctcag

SEQ ID NO: 9116 - DNA, 21 bp, synthetic construct
  source 1..21: mol_type = other DNA
gtggcgttggcggttaggggg

SEQ ID NO: 9117 - RNA, 21 nt, synthetic construct
  source 1..21: mol_type = other RNA
  ncRNA 1..21: ncRNA_class = other; note = mRNA
gctattgctaatagttctatt

SEQ ID NO: 9118 - RNA, 21 nt, synthetic construct
  source 1..21: mol_type = other RNA
  ncRNA 1..21: ncRNA_class = other; note = mRNA
agttttcctagtgttgggtct

SEQ ID NO: 9119 - DNA, 21 bp, synthetic construct
  source 1..21: mol_type = other DNA
gacggggtccacagaccttca

SEQ ID NO: 9120 - DNA, 21 bp, synthetic construct
  source 1..21: mol_type = other DNA
cgggagctgaatatgatgtcg

SEQ ID NO: 9121 - RNA, 21 nt, synthetic construct
  source 1..21: mol_type = other RNA
  ncRNA 1..21: ncRNA_class = other; note = mRNA
aataaggatgggggtttgaat

SEQ ID NO: 9122 - DNA, 21 bp, synthetic construct
  source 1..21: mol_type = other DNA
ctggggcaatccagtgtaggc

SEQ ID NO: 9123 - DNA, 21 bp, synthetic construct
  source 1..21: mol_type = other DNA
tatcatgagcgggttccgttg

SEQ ID NO: 9124 - DNA, 21 bp, synthetic construct
  source 1..21: mol_type = other DNA
cagaatgggccgacgagtcgg

SEQ ID NO: 9125 - DNA, 21 bp, synthetic construct
  source 1..21: mol_type = other DNA
gggccggtgcgggtgggtatt

SEQ ID NO: 9126 - DNA, 21 bp, synthetic construct
  source 1..21: mol_type = other DNA
cactacgtggtaggtggcgcg

SEQ ID NO: 9127 - DNA, 21 bp, synthetic construct
  source 1..21: mol_type = other DNA
atgatgcctaggagtgcgatg

SEQ ID NO: 9128 - DNA, 21 bp, synthetic construct
  source 1..21: mol_type = other DNA
ggacgaggcgaccacggagta

SEQ ID NO: 9129 - DNA, 21 bp, synthetic construct
  source 1..21: mol_type = other DNA
atgatggttaagcatcaggct

SEQ ID NO: 9130 - DNA, 21 bp, synthetic construct
  source 1..21: mol_type = other DNA
gacttaaacttcggacctggc

SEQ ID NO: 9131 - DNA, 21 bp, synthetic construct
  source 1..21: mol_type = other DNA
cggcttggggtttctaatctg

SEQ ID NO: 9132 - DNA, 21 bp, synthetic construct
  source 1..21: mol_type = other DNA
agcccccaagacacgcaagga

SEQ ID NO: 9133 - DNA, 21 bp, synthetic construct
  source 1..21: mol_type = other DNA
cagccgtctgtgggtgcgagt

SEQ ID NO: 9134 - DNA, 21 bp, synthetic construct
  source 1..21: mol_type = other DNA
gtcgtaaacaacacatcttgg

SEQ ID NO: 9135 - RNA, 21 nt, synthetic construct
  source 1..21: mol_type = other RNA
  ncRNA 1..21: ncRNA_class = other; note = mRNA
acgacgaagcttcttgtgatt

SEQ ID NO: 9136 - RNA, 21 nt, synthetic construct
  source 1..21: mol_type = other RNA
  ncRNA 1..21: ncRNA_class = other; note = mRNA
cttaatgggggtaggtctacg

SEQ ID NO: 9137 - DNA, 21 bp, synthetic construct
  source 1..21: mol_type = other DNA
agtggggtccactccgtcctg

SEQ ID NO: 9138 - DNA, 21 bp, synthetic construct
  source 1..21: mol_type = other DNA
accggcacagtaatatcaccc

SEQ ID NO: 9139 - DNA, 21 bp, synthetic construct
  source 1..21: mol_type = other DNA
tatgcgggtccgattagtggg

SEQ ID NO: 9140 - DNA, 21 bp, synthetic construct
  source 1..21: mol_type = other DNA
cattctgaggttcgtggtact

SEQ ID NO: 9141 - RNA, 21 nt, synthetic construct
  source 1..21: mol_type = other RNA
  ncRNA 1..21: ncRNA_class = other; note = mRNA
caggagtctgtttcgagtcct

SEQ ID NO: 9142 - DNA, 21 bp, synthetic construct
  source 1..21: mol_type = other DNA
atcgggacctcaggcccagtt

SEQ ID NO: 9143 - DNA, 21 bp, synthetic construct
  source 1..21: mol_type = other DNA
tctggtcttcattcgcaggat

SEQ ID NO: 9144 - DNA, 21 bp, synthetic construct
  source 1..21: mol_type = other DNA
tttcagaatacgagtagtgct

SEQ ID NO: 9145 - RNA, 21 nt, synthetic construct
  source 1..21: mol_type = other RNA
  ncRNA 1..21: ncRNA_class = other; note = mRNA
gcggtagcaaacgtgccaatg

SEQ ID NO: 9146 - RNA, 21 nt, synthetic construct
  source 1..21: mol_type = other RNA
  ncRNA 1..21: ncRNA_class = other; note = mRNA
actgttcctgggtcttctgtg

SEQ ID NO: 9147 - DNA, 21 bp, synthetic construct
  source 1..21: mol_type = other DNA
tcgatgcatgctaatcaggcg

SEQ ID NO: 9148 - DNA, 21 bp, synthetic construct
  source 1..21: mol_type = other DNA
aatcctggtgtggtgctggct

SEQ ID NO: 9149 - DNA, 21 bp, synthetic construct
  source 1..21: mol_type = other DNA
cgtaatcctgggccgagtatt

SEQ ID NO: 9150 - DNA, 21 bp, synthetic construct
  source 1..21: mol_type = other DNA
gggttgacgcgtttgactaat

SEQ ID NO: 9151 - RNA, 21 nt, synthetic construct
  source 1..21: mol_type = other RNA
  ncRNA 1..21: ncRNA_class = other; note = mRNA
agggagtctacttctgttgat

SEQ ID NO: 9152 - DNA, 21 bp, synthetic construct
  source 1..21: mol_type = other DNA
ggggaaaggtacaacgacact

SEQ ID NO: 9153 - DNA, 21 bp, synthetic construct
  source 1..21: mol_type = other DNA
ggttcgattaaggagatgagt

SEQ ID NO: 9154 - DNA, 21 bp, synthetic construct
  source 1..21: mol_type = other DNA
tcgcaccgaatcacagacagt

SEQ ID NO: 9155 - DNA, 21 bp, synthetic construct
  source 1..21: mol_type = other DNA
gcaggcgtctaccgcgccgac

SEQ ID NO: 9156 - DNA, 21 bp, synthetic construct
  source 1..21: mol_type = other DNA
gttgtttcgggtgttgctgtg

SEQ ID NO: 9157 - DNA, 21 bp, synthetic construct
  source 1..21: mol_type = other DNA
cctcctgcggcgcattcgggg

SEQ ID NO: 9158 - DNA, 21 bp, synthetic construct
  source 1..21: mol_type = other DNA
gcacgaggcatcggctcaaac

SEQ ID NO: 9159 - DNA, 21 bp, synthetic construct
  source 1..21: mol_type = other DNA
actgggactactctgactgct

SEQ ID NO: 9160 - DNA, 21 bp, synthetic construct
  source 1..21: mol_type = other DNA
gacggaggaggtaaagttgta

SEQ ID NO: 9161 - DNA, 21 bp, synthetic construct
  source 1..21: mol_type = other DNA
attggtacttcgggtgctgtg

SEQ ID NO: 9162 - DNA, 21 bp, synthetic construct
  source 1..21: mol_type = other DNA
ggtactagtgggtcgttgaag

SEQ ID NO: 9163 - DNA, 21 bp, synthetic construct
  source 1..21: mol_type = other DNA
gatttgcgttttcggcaggat

SEQ ID NO: 9164 - DNA, 21 bp, synthetic construct
  source 1..21: mol_type = other DNA
tatggtgcttcttcttcgaag

SEQ ID NO: 9165 - DNA, 21 bp, synthetic construct
  source 1..21: mol_type = other DNA
cgtgtagcactgacagtggga

SEQ ID NO: 9166 - RNA, 21 nt, synthetic construct
  source 1..21: mol_type = other RNA
  ncRNA 1..21: ncRNA_class = other; note = mRNA
ggggttttgcgttctgaggat

SEQ ID NO: 9167 - RNA, 21 nt, synthetic construct
  source 1..21: mol_type = other RNA
  ncRNA 1..21: ncRNA_class = other; note = mRNA
gctggtaattatgctggtgtt

SEQ ID NO: 9168 - DNA, 21 bp, synthetic construct
  source 1..21: mol_type = other DNA
agtaggggggatgctgctatt

SEQ ID NO: 9169 - DNA, 21 bp, synthetic construct
  source 1..21: mol_type = other DNA
ttgggggcgcagaatgctcgg

SEQ ID NO: 9170 - DNA, 21 bp, synthetic construct
  source 1..21: mol_type = other DNA
cgtgtaaccacagcactagca

SEQ ID NO: 9171 - RNA, 21 nt, synthetic construct
  source 1..21: mol_type = other RNA
  ncRNA 1..21: ncRNA_class = other; note = mRNA
cacaactccgcaatgaacgaa

SEQ ID NO: 9172 - DNA, 21 bp, synthetic construct
  source 1..21: mol_type = other DNA
caaggcacatccgaccgccac

SEQ ID NO: 9173 - DNA, 21 bp, synthetic construct
  source 1..21: mol_type = other DNA
gttaatgcgaaggaggcttcg

SEQ ID NO: 9174 - DNA, 21 bp, synthetic construct
  source 1..21: mol_type = other DNA
gagtctggggcgggtaatagg

SEQ ID NO: 9175 - RNA, 21 nt, synthetic construct
  source 1..21: mol_type = other RNA
  ncRNA 1..21: ncRNA_class = other; note = mRNA
tctatgaatcatcgtgttgcg

SEQ ID NO: 9176 - DNA, 21 bp, synthetic construct
  source 1..21: mol_type = other DNA
cggcacgaatccctgctggaa

SEQ ID NO: 9177 - DNA, 21 bp, synthetic construct
  source 1..21: mol_type = other DNA
aatatgttgtcgactgttcct

SEQ ID NO: 9178 - DNA, 21 bp, synthetic construct
  source 1..21: mol_type = other DNA
actgcgggtctgactacggtt

SEQ ID NO: 9179 - DNA, 21 bp, synthetic construct
  source 1..21: mol_type = other DNA
gcacttggcagtggtgctaca

SEQ ID NO: 9180 - DNA, 21 bp, synthetic construct
  source 1..21: mol_type = other DNA
cgattcgtacaatcccgtgaa

SEQ ID NO: 9181 - DNA, 21 bp, synthetic construct
  source 1..21: mol_type = other DNA
aaggttccgttgactaatgtt

SEQ ID NO: 9182 - DNA, 21 bp, synthetic construct
  source 1..21: mol_type = other DNA
agggatcaggctgtggtgggg

SEQ ID NO: 9183 - DNA, 21 bp, synthetic construct
  source 1..21: mol_type = other DNA
cgggatcgtatgaatcttcat

SEQ ID NO: 9184 - DNA, 21 bp, synthetic construct
  source 1..21: mol_type = other DNA
atacgaggggcaggcgaagga

SEQ ID NO: 9185 - DNA, 21 bp, synthetic construct
  source 1..21: mol_type = other DNA
ataggtagcgtcacgcactcc

SEQ ID NO: 9186 - DNA, 21 bp, synthetic construct
  source 1..21: mol_type = other DNA
ggtgggtcttcgcatgctttg

SEQ ID NO: 9187 - DNA, 21 bp, synthetic construct
  source 1..21: mol_type = other DNA
tctcagcttaatgcgtctcat

SEQ ID NO: 9188 - DNA, 21 bp, synthetic construct
  source 1..21: mol_type = other DNA
atcggaccaatgactgtggtc

SEQ ID NO: 9189 - RNA, 21 nt, synthetic construct
  source 1..21: mol_type = other RNA
  ncRNA 1..21: ncRNA_class = other; note = mRNA
tcggtgctttcgtcggggccg

SEQ ID NO: 9190 - RNA, 21 nt, synthetic construct
  source 1..21: mol_type = other RNA
  ncRNA 1..21: ncRNA_class = other; note = mRNA
attgttgttcagaatcggttt

SEQ ID NO: 9191 - DNA, 21 bp, synthetic construct
  source 1..21: mol_type = other DNA
acggtgaattctattagtttt

SEQ ID NO: 9192 - RNA, 21 nt, synthetic construct
  source 1..21: mol_type = other RNA
  ncRNA 1..21: ncRNA_class = other; note = mRNA
gcgattgctaatagtcctatt

SEQ ID NO: 9193 - DNA, 21 bp, synthetic construct
  source 1..21: mol_type = other DNA
gctgcgcgggaggctggttct

SEQ ID NO: 9194 - DNA, 21 bp, synthetic construct
  source 1..21: mol_type = other DNA
ggctccaactcatcaatgcta

SEQ ID NO: 9195 - DNA, 21 bp, synthetic construct
  source 1..21: mol_type = other DNA
tggctgaagcctacgactggg

SEQ ID NO: 9196 - DNA, 21 bp, synthetic construct
  source 1..21: mol_type = other DNA
ctgaatactgctgttagtgcg

SEQ ID NO: 9197 - DNA, 21 bp, synthetic construct
  source 1..21: mol_type = other DNA
gttttttcgtctggccttggt

SEQ ID NO: 9198 - DNA, 21 bp, synthetic construct
  source 1..21: mol_type = other DNA
tttgatgcgaaggcgcctacg

SEQ ID NO: 9199 - DNA, 21 bp, synthetic construct
  source 1..21: mol_type = other DNA
gtgggtcagactttgcagctg

SEQ ID NO: 9200 - DNA, 21 bp, synthetic construct
  source 1..21: mol_type = other DNA
gtagaacctgggtctcacttc

SEQ ID NO: 9201 - DNA, 21 bp, synthetic construct
  source 1..21: mol_type = other DNA
atggattttggtagtgcttcg

SEQ ID NO: 9202 - DNA, 21 bp, synthetic construct
  source 1..21: mol_type = other DNA
ctaacatcatcaaacacgatg

SEQ ID NO: 9203 - DNA, 21 bp, synthetic construct
  source 1..21: mol_type = other DNA
actgataatttgggggtgttt

SEQ ID NO: 9204 - DNA, 21 bp, synthetic construct
  source 1..21: mol_type = other DNA
aatgcgatttcgagtaggagt

SEQ ID NO: 9205 - DNA, 21 bp, synthetic construct
  source 1..21: mol_type = other DNA
gaagcctcgggagtcaggggg

SEQ ID NO: 9206 - DNA, 21 bp, synthetic construct
  source 1..21: mol_type = other DNA
ctgccgaggagggagggtgct

SEQ ID NO: 9207 - DNA, 21 bp, synthetic construct
  source 1..21: mol_type = other DNA
ctagctggccgctcggtacca

SEQ ID NO: 9208 - DNA, 21 bp, synthetic construct
  source 1..21: mol_type = other DNA
acgggatgagtacgaagcttg

SEQ ID NO: 9209 - DNA, 21 bp, synthetic construct
  source 1..21: mol_type = other DNA
agcttagtgaacaacacattc

SEQ ID NO: 9210 - DNA, 21 bp, synthetic construct
  source 1..21: mol_type = other DNA
gcgggcgcctcagggaggccc

SEQ ID NO: 9211 - DNA, 21 bp, synthetic construct
  source 1..21: mol_type = other DNA
ggcactgcggcaataggctca

SEQ ID NO: 9212 - DNA, 21 bp, synthetic construct
  source 1..21: mol_type = other DNA
ttcgaccaaaaaagcccatac

SEQ ID NO: 9213 - DNA, 21 bp, synthetic construct
  source 1..21: mol_type = other DNA
gcgaatcagtatccgactggg

SEQ ID NO: 9214 - DNA, 21 bp, synthetic construct
  source 1..21: mol_type = other DNA
aagcgtggggatgatagtatg

SEQ ID NO: 9215 - RNA, 21 nt, synthetic construct
  source 1..21: mol_type = other RNA
  ncRNA 1..21: ncRNA_class = other; note = mRNA
gttaagcctaattcttcggct

SEQ ID NO: 9216 - DNA, 21 bp, synthetic construct
  source 1..21: mol_type = other DNA
acaaaaatgataatggtcggc

SEQ ID NO: 9217 - DNA, 21 bp, synthetic construct
  source 1..21: mol_type = other DNA
acgggcagcgcagtgatgata

SEQ ID NO: 9218 - DNA, 21 bp, synthetic construct
  source 1..21: mol_type = other DNA
attggggctgctcggcctaat

SEQ ID NO: 9219 - DNA, 21 bp, synthetic construct
  source 1..21: mol_type = other DNA
gctacacgaatgcacgaggga

SEQ ID NO: 9220 - DNA, 21 bp, synthetic construct
  source 1..21: mol_type = other DNA
atctcaaacaacacacgagag

SEQ ID NO: 9221 - DNA, 21 bp, synthetic construct
  source 1..21: mol_type = other DNA
ggatgggtcgaagttcaaaga

SEQ ID NO: 9222 - DNA, 21 bp, synthetic construct
  source 1..21: mol_type = other DNA
gcggttaatgctgagccgcgt

SEQ ID NO: 9223 - DNA, 21 bp, synthetic construct
  source 1..21: mol_type = other DNA
ggatgggtcgaagatcaaagt

SEQ ID NO: 9224 - DNA, 21 bp, synthetic construct
  source 1..21: mol_type = other DNA
tttagttatgtgggtatgacg

SEQ ID NO: 9225 - DNA, 21 bp, synthetic construct
  source 1..21: mol_type = other DNA
cacccggcgggcggtctcggg

SEQ ID NO: 9226 - DNA, 21 bp, synthetic construct
  source 1..21: mol_type = other DNA
gcggataatgctgtgccgcgt

SEQ ID NO: 9227 - DNA, 21 bp, synthetic construct
  source 1..21: mol_type = other DNA
tttagttctgagggtatgacg

SEQ ID NO: 9228 - DNA, 21 bp, synthetic construct
  source 1..21: mol_type = other DNA
gcggttaatgctgtgacgcgt

SEQ ID NO: 9229 - DNA, 21 bp, synthetic construct
  source 1..21: mol_type = other DNA
cgtccggtgcagggtgagaaa

SEQ ID NO: 9230 - DNA, 21 bp, synthetic construct
  source 1..21: mol_type = other DNA
tagcgttctgttcctttgggt

SEQ ID NO: 9231 - DNA, 21 bp, synthetic construct
  source 1..21: mol_type = other DNA
gctacacgaaagcacgtggga

SEQ ID NO: 9232 - DNA, 21 bp, synthetic construct
  source 1..21: mol_type = other DNA
gcggttaatgctgtgcagcgt

SEQ ID NO: 9233 - DNA, 21 bp, synthetic construct
  source 1..21: mol_type = other DNA
tcttacaccacatcgatcgcg

SEQ ID NO: 9234 - DNA, 21 bp, synthetic construct
  source 1..21: mol_type = other DNA
atgcgttctgttcctttgggt

SEQ ID NO: 9235 - DNA, 21 bp, synthetic construct
  source 1..21: mol_type = other DNA
gtaaaaccatcgccctcagag

SEQ ID NO: 9236 - DNA, 21 bp, synthetic construct
  source 1..21: mol_type = other DNA
tatagttctgtgggtatgacg

SEQ ID NO: 9237 - DNA, 21 bp, synthetic construct
  source 1..21: mol_type = other DNA
attagttctgtgggtatgacg

SEQ ID NO: 9238 - DNA, 21 bp, synthetic construct
  source 1..21: mol_type = other DNA
tttagatctgtgggtatgacg

SEQ ID NO: 9239 - DNA, 21 bp, synthetic construct
  source 1..21: mol_type = other DNA
acggctgagtattctgagagg

SEQ ID NO: 9240 - DNA, 21 bp, synthetic construct
  source 1..21: mol_type = other DNA
gctcacgaaataaaaggggac

SEQ ID NO: 9241 - DNA, 21 bp, synthetic construct
  source 1..21: mol_type = other DNA
gctacacgaatgaacgtggga

SEQ ID NO: 9242 - DNA, 21 bp, synthetic construct
  source 1..21: mol_type = other DNA
gctaacgaaataaacggggac

SEQ ID NO: 9243 - DNA, 21 bp, synthetic construct
  source 1..21: mol_type = other DNA
attatgtctcagggtcggaga

SEQ ID NO: 9244 - DNA, 21 bp, synthetic construct
  source 1..21: mol_type = other DNA
ggattacaattacccagcgcc

SEQ ID NO: 9245 - DNA, 21 bp, synthetic construct
  source 1..21: mol_type = other DNA
gcggttaatgatgtgccgcgt

SEQ ID NO: 9246 - DNA, 21 bp, synthetic construct
  source 1..21: mol_type = other DNA
gctcacgaaaaaaacggggac

SEQ ID NO: 9247 - DNA, 21 bp, synthetic construct
  source 1..21: mol_type = other DNA
tatcatagtgagaagattgct

SEQ ID NO: 9248 - DNA, 21 bp, synthetic construct
  source 1..21: mol_type = other DNA
caccaagccagcgatatccaa

SEQ ID NO: 9249 - DNA, 21 bp, synthetic construct
  source 1..21: mol_type = other DNA
ctggggattagatatgcggcg

SEQ ID NO: 9250 - DNA, 21 bp, synthetic construct
  source 1..21: mol_type = other DNA
acggttcctggggaggatgcg

SEQ ID NO: 9251 - DNA, 21 bp, synthetic construct
  source 1..21: mol_type = other DNA
attcatagtgagaagattgct

SEQ ID NO: 9252 - DNA, 21 bp, synthetic construct
  source 1..21: mol_type = other DNA
ttgagttctgttcctttgggt

SEQ ID NO: 9253 - DNA, 21 bp, synthetic construct
  source 1..21: mol_type = other DNA
ttgcgttctgttcctatgggt

SEQ ID NO: 9254 - DNA, 21 bp, synthetic construct
  source 1..21: mol_type = other DNA
caaccagacggtgctctccca

SEQ ID NO: 9255 - DNA, 21 bp, synthetic construct
  source 1..21: mol_type = other DNA
ctggggattagttatgaggcg

SEQ ID NO: 9256 - DNA, 21 bp, synthetic construct
  source 1..21: mol_type = other DNA
tccaacaactagcctctcccg

SEQ ID NO: 9257 - DNA, 21 bp, synthetic construct
  source 1..21: mol_type = other DNA
acggatcctggggaggttgcg

SEQ ID NO: 9258 - RNA, 21 nt, synthetic construct
  source 1..21: mol_type = other RNA
  ncRNA 1..21: ncRNA_class = other; note = mRNA
tcggtgctttcgccggggccg

SEQ ID NO: 9259 - DNA, 21 bp, synthetic construct
  source 1..21: mol_type = other DNA
gtgtcgaattagggtggtctt

SEQ ID NO: 9260 - DNA, 21 bp, synthetic construct
  source 1..21: mol_type = other DNA
caccaagccagcgttatcaaa

SEQ ID NO: 9261 - DNA, 21 bp, synthetic construct
  source 1..21: mol_type = other DNA
gacagccggttcatcagatcc

SEQ ID NO: 9262 - DNA, 21 bp, synthetic construct
  source 1..21: mol_type = other DNA
tttcatagagagaagattgct

SEQ ID NO: 9263 - DNA, 21 bp, synthetic construct
  source 1..21: mol_type = other DNA
gaggttaatgctgtgccgcgt

SEQ ID NO: 9264 - DNA, 21 bp, synthetic construct
  source 1..21: mol_type = other DNA
gagcggctgagagataagggt

SEQ ID NO: 9265 - DNA, 21 bp, synthetic construct
  source 1..21: mol_type = other DNA
ttgcgttctgttccttagggt

SEQ ID NO: 9266 - DNA, 21 bp, synthetic construct
  source 1..21: mol_type = other DNA
cacaaagccagcgttatccaa

SEQ ID NO: 9267 - DNA, 21 bp, synthetic construct
  source 1..21: mol_type = other DNA
gctcacgaaataaacggggcc

SEQ ID NO: 9268 - DNA, 21 bp, synthetic construct
  source 1..21: mol_type = other DNA
ggattacaattcaccagcgcc

SEQ ID NO: 9269 - DNA, 21 bp, synthetic construct
  source 1..21: mol_type = other DNA
actctggagtctaggactggg

SEQ ID NO: 9270 - DNA, 21 bp, synthetic construct
  source 1..21: mol_type = other DNA
gtgtcgatttcgggtggtctt

SEQ ID NO: 9271 - DNA, 21 bp, synthetic construct
  source 1..21: mol_type = other DNA
ggcgtaacatacaaaacgcga

SEQ ID NO: 9272 - DNA, 21 bp, synthetic construct
  source 1..21: mol_type = other DNA
gcggttaatgctctgccgcgt

SEQ ID NO: 9273 - DNA, 21 bp, synthetic construct
  source 1..21: mol_type = other DNA
gctcacgaaataaactgggac

SEQ ID NO: 9274 - DNA, 21 bp, synthetic construct
  source 1..21: mol_type = other DNA
gcgggtcttgttcatacggat

SEQ ID NO: 9275 - DNA, 21 bp, synthetic construct
  source 1..21: mol_type = other DNA
gcggttaaagctgtgccgcgt

SEQ ID NO: 9276 - DNA, 21 bp, synthetic construct
  source 1..21: mol_type = other DNA
caaccagtcggtgctctcaca

SEQ ID NO: 9277 - DNA, 21 bp, synthetic construct
  source 1..21: mol_type = other DNA
ggatgggtcgatgttcaaagt

SEQ ID NO: 9278 - DNA, 21 bp, synthetic construct
  source 1..21: mol_type = other DNA
acggctgcgaattctgagagg

SEQ ID NO: 9279 - DNA, 21 bp, synthetic construct
  source 1..21: mol_type = other DNA
tccaacaacatgcctctcccg

SEQ ID NO: 9280 - DNA, 21 bp, synthetic construct
  source 1..21: mol_type = other DNA
ggtaagatgaagtatggggat

SEQ ID NO: 9281 - DNA, 21 bp, synthetic construct
  source 1..21: mol_type = other DNA
tacatggacacccgttccaag

SEQ ID NO: 9282 - DNA, 21 bp, synthetic construct
  source 1..21: mol_type = other DNA
ttgcgttctgttactttgggt

SEQ ID NO: 9283 - DNA, 21 bp, synthetic construct
  source 1..21: mol_type = other DNA
ccctcatctcactaccccgca

SEQ ID NO: 9284 - DNA, 21 bp, synthetic construct
  source 1..21: mol_type = other DNA
gctacacgaatccacgtggga

SEQ ID NO: 9285 - DNA, 21 bp, synthetic construct
  source 1..21: mol_type = other DNA
acggctgcgtattatgagagg

SEQ ID NO: 9286 - DNA, 21 bp, synthetic construct
  source 1..21: mol_type = other DNA
acggttcatggggaggttgcg

SEQ ID NO: 9287 - DNA, 21 bp, synthetic construct
  source 1..21: mol_type = other DNA
tctgatcggggtagtagagtg

SEQ ID NO: 9288 - DNA, 21 bp, synthetic construct
  source 1..21: mol_type = other DNA
tacatggacacccgtaccatg

SEQ ID NO: 9289 - DNA, 21 bp, synthetic construct
  source 1..21: mol_type = other DNA
cgtgattctgggaagagatcg

SEQ ID NO: 9290 - DNA, 21 bp, synthetic construct
  source 1..21: mol_type = other DNA
acggctgcgtatactgagagg

SEQ ID NO: 9291 - DNA, 21 bp, synthetic construct
  source 1..21: mol_type = other DNA
ggatgggtcgaagttaaaagt

SEQ ID NO: 9292 - DNA, 21 bp, synthetic construct
  source 1..21: mol_type = other DNA
atcgggacctcaggcccagat

SEQ ID NO: 9293 - DNA, 21 bp, synthetic construct
  source 1..21: mol_type = other DNA
accggcggcgtcggggtaaag

SEQ ID NO: 9294 - DNA, 21 bp, synthetic construct
  source 1..21: mol_type = other DNA
actggagtcggtagacacgca

SEQ ID NO: 9295 - DNA, 21 bp, synthetic construct
  source 1..21: mol_type = other DNA
ggattacaaatccccagcgcc

SEQ ID NO: 9296 - DNA, 21 bp, synthetic construct
  source 1..21: mol_type = other DNA
ttgcgttctgttcatttgggt

SEQ ID NO: 9297 - DNA, 21 bp, synthetic construct
  source 1..21: mol_type = other DNA
ttgcgttctgatcctttgggt

SEQ ID NO: 9298 - DNA, 21 bp, synthetic construct
  source 1..21: mol_type = other DNA
gagtcgaattcgggtggtctt

SEQ ID NO: 9299 - DNA, 21 bp, synthetic construct
  source 1..21: mol_type = other DNA
gcggttaatgctgtgccgagt

SEQ ID NO: 9300 - DNA, 21 bp, synthetic construct
  source 1..21: mol_type = other DNA
tctgatcggggtagtagtgag

SEQ ID NO: 9301 - DNA, 21 bp, synthetic construct
  source 1..21: mol_type = other DNA
accggcgcaagagacagatta

SEQ ID NO: 9302 - DNA, 21 bp, synthetic construct
  source 1..21: mol_type = other DNA
cgtccggagcagggtgagaat

SEQ ID NO: 9303 - DNA, 21 bp, synthetic construct
  source 1..21: mol_type = other DNA
aacatggacacccgttccatg

SEQ ID NO: 9304 - DNA, 21 bp, synthetic construct
  source 1..21: mol_type = other DNA
accgtacgtggctccgtcgac

SEQ ID NO: 9305 - DNA, 21 bp, synthetic construct
  source 1..21: mol_type = other DNA
ttaagttctgtgggtatgacg

SEQ ID NO: 9306 - DNA, 21 bp, synthetic construct
  source 1..21: mol_type = other DNA
acggttactggggaggttgcg

SEQ ID NO: 9307 - DNA, 21 bp, synthetic construct
  source 1..21: mol_type = other DNA
gctggtattacgggtagaggt

SEQ ID NO: 9308 - DNA, 21 bp, synthetic construct
  source 1..21: mol_type = other DNA
gcgcttaatgctgtgccgcgt

SEQ ID NO: 9309 - DNA, 21 bp, synthetic construct
  source 1..21: mol_type = other DNA
tttcatagtgagaagattgat

SEQ ID NO: 9310 - DNA, 21 bp, synthetic construct
  source 1..21: mol_type = other DNA
gcttatgggtcggatcagacg

SEQ ID NO: 9311 - DNA, 21 bp, synthetic construct
  source 1..21: mol_type = other DNA
tctgatcggggtagaagtgtg

SEQ ID NO: 9312 - DNA, 21 bp, synthetic construct
  source 1..21: mol_type = other DNA
tttagtactgtgggtatgacg

SEQ ID NO: 9313 - DNA, 21 bp, synthetic construct
  source 1..21: mol_type = other DNA
accgcagaccgctaccaaaag

SEQ ID NO: 9314 - DNA, 21 bp, synthetic construct
  source 1..21: mol_type = other DNA
gctcacgaaataaacgcggac

SEQ ID NO: 9315 - DNA, 21 bp, synthetic construct
  source 1..21: mol_type = other DNA
ccatctgtcgggcgggaaaga

SEQ ID NO: 9316 - DNA, 21 bp, synthetic construct
  source 1..21: mol_type = other DNA
gctcacgaaataaaccgggac

SEQ ID NO: 9317 - DNA, 21 bp, synthetic construct
  source 1..21: mol_type = other DNA
ttgcatcttgattcgacgcct

SEQ ID NO: 9318 - DNA, 21 bp, synthetic construct
  source 1..21: mol_type = other DNA
ccctcatctcacatccccgca

SEQ ID NO: 9319 - DNA, 21 bp, synthetic construct
  source 1..21: mol_type = other DNA
actgatcggggtagtagtgtg

SEQ ID NO: 9320 - DNA, 21 bp, synthetic construct
  source 1..21: mol_type = other DNA
gtaaaacaatcgccctcagtg

SEQ ID NO: 9321 - DNA, 21 bp, synthetic construct
  source 1..21: mol_type = other DNA
ggatgggacgaagttcaaagt

SEQ ID NO: 9322 - DNA, 21 bp, synthetic construct
  source 1..21: mol_type = other DNA
gacagccggatcatcagttcc

SEQ ID NO: 9323 - DNA, 21 bp, synthetic construct
  source 1..21: mol_type = other DNA
tcttacaccacatcgtacgcg

SEQ ID NO: 9324 - DNA, 21 bp, synthetic construct
  source 1..21: mol_type = other DNA
cggggggtcgaggttaactcg

SEQ ID NO: 9325 - DNA, 21 bp, synthetic construct
  source 1..21: mol_type = other DNA
ctttatggtggggttgctgcg

SEQ ID NO: 9326 - DNA, 21 bp, synthetic construct
  source 1..21: mol_type = other DNA
acggttcctggggaggttgag

SEQ ID NO: 9327 - DNA, 21 bp, synthetic construct
  source 1..21: mol_type = other DNA
ctggggattagttaagcggcg

SEQ ID NO: 9328 - DNA, 21 bp, synthetic construct
  source 1..21: mol_type = other DNA
caccaggcgggcggtctcggg

SEQ ID NO: 9329 - DNA, 21 bp, synthetic construct
  source 1..21: mol_type = other DNA
gtggttggtatgattaataga

SEQ ID NO: 9330 - DNA, 21 bp, synthetic construct
  source 1..21: mol_type = other DNA
ggaagggtcgaagttcaaagt

SEQ ID NO: 9331 - DNA, 21 bp, synthetic construct
  source 1..21: mol_type = other DNA
tccatggacactctattatcc

SEQ ID NO: 9332 - DNA, 21 bp, synthetic construct
  source 1..21: mol_type = other DNA
cttattggtggggttgctgcg

SEQ ID NO: 9333 - DNA, 21 bp, synthetic construct
  source 1..21: mol_type = other DNA
tttagttctgtgtgtatgacg

SEQ ID NO: 9334 - DNA, 21 bp, synthetic construct
  source 1..21: mol_type = other DNA
agtagttttcatgctaattat

SEQ ID NO: 9335 - DNA, 21 bp, synthetic construct
  source 1..21: mol_type = other DNA
tttagttctgtgggtaagacg

SEQ ID NO: 9336 - RNA, 21 nt, synthetic construct
  source 1..21: mol_type = other RNA
  ncRNA 1..21: ncRNA_class = other; note = mRNA
caggggattagttatgcggcg

SEQ ID NO: 9337 - DNA, 21 bp, synthetic construct
  source 1..21: mol_type = other DNA
cgtccggtgaagggtgagaat

SEQ ID NO: 9338 - DNA, 21 bp, synthetic construct
  source 1..21: mol_type = other DNA
gggctgattaagaaagctact

SEQ ID NO: 9339 - DNA, 21 bp, synthetic construct
  source 1..21: mol_type = other DNA
tcgcaccgaatcacagacaga

SEQ ID NO: 9340 - DNA, 21 bp, synthetic construct
  source 1..21: mol_type = other DNA
tccaacaacttgcctctcacg

SEQ ID NO: 9341 - DNA, 21 bp, synthetic construct
  source 1..21: mol_type = other DNA
tcttacaccacaacgttcgcg

SEQ ID NO: 9342 - DNA, 21 bp, synthetic construct
  source 1..21: mol_type = other DNA
gttactaagagtgagacgaag

SEQ ID NO: 9343 - DNA, 21 bp, synthetic construct
  source 1..21: mol_type = other DNA
ttgcgttctgttcgtttgggt

SEQ ID NO: 9344 - DNA, 21 bp, synthetic construct
  source 1..21: mol_type = other DNA
ctgttttcgactactgagaaa

SEQ ID NO: 9345 - DNA, 21 bp, synthetic construct
  source 1..21: mol_type = other DNA
accggcgcaagagacagtata

SEQ ID NO: 9346 - DNA, 21 bp, synthetic construct
  source 1..21: mol_type = other DNA
cattttggtggggttgctgcg

SEQ ID NO: 9347 - DNA, 21 bp, synthetic construct
  source 1..21: mol_type = other DNA
gactcgaacggcttacagaca

SEQ ID NO: 9348 - DNA, 21 bp, synthetic construct
  source 1..21: mol_type = other DNA
gctacacgaatgcaagtggga

SEQ ID NO: 9349 - DNA, 21 bp, synthetic construct
  source 1..21: mol_type = other DNA
cttttaggtggggttgctgcg

SEQ ID NO: 9350 - DNA, 21 bp, synthetic construct
  source 1..21: mol_type = other DNA
tcttcggttcatgtgattacg

SEQ ID NO: 9351 - DNA, 21 bp, synthetic construct
  source 1..21: mol_type = other DNA
acttttgatgataggggtggt

SEQ ID NO: 9352 - DNA, 21 bp, synthetic construct
  source 1..21: mol_type = other DNA
gttactaagagagagacgatg

SEQ ID NO: 9353 - DNA, 21 bp, synthetic construct
  source 1..21: mol_type = other DNA
actcgtgttgctgatacggaa

SEQ ID NO: 9354 - DNA, 21 bp, synthetic construct
  source 1..21: mol_type = other DNA
gtaaaaccaacgccctcagtg

SEQ ID NO: 9355 - DNA, 21 bp, synthetic construct
  source 1..21: mol_type = other DNA
atactagactcatggcctgcc

SEQ ID NO: 9356 - DNA, 21 bp, synthetic construct
  source 1..21: mol_type = other DNA
attggtcgtatgagtggtgat

SEQ ID NO: 9357 - DNA, 21 bp, synthetic construct
  source 1..21: mol_type = other DNA
gagaggggtgataattagctt

SEQ ID NO: 9358 - DNA, 21 bp, synthetic construct
  source 1..21: mol_type = other DNA
tttagttctgtgggtatgaag

SEQ ID NO: 9359 - DNA, 21 bp, synthetic construct
  source 1..21: mol_type = other DNA
aacagcgtaagaggaggctca

SEQ ID NO: 9360 - DNA, 21 bp, synthetic construct
  source 1..21: mol_type = other DNA
gtgtcgaatacgggtggtctt

SEQ ID NO: 9361 - DNA, 21 bp, synthetic construct
  source 1..21: mol_type = other DNA
aataatggtacgtagctttct

SEQ ID NO: 9362 - DNA, 21 bp, synthetic construct
  source 1..21: mol_type = other DNA
gcggttaatcctgtgccgcgt

SEQ ID NO: 9363 - DNA, 21 bp, synthetic construct
  source 1..21: mol_type = other DNA
aactcaaacaacacacgagtg

SEQ ID NO: 9364 - DNA, 21 bp, synthetic construct
  source 1..21: mol_type = other DNA
tacaaggacacccgttccatg

SEQ ID NO: 9365 - DNA, 21 bp, synthetic construct
  source 1..21: mol_type = other DNA
aataatggtacgatgctttct

SEQ ID NO: 9366 - DNA, 21 bp, synthetic construct
  source 1..21: mol_type = other DNA
cgtcaggtgcagggtgagaat

SEQ ID NO: 9367 - DNA, 21 bp, synthetic construct
  source 1..21: mol_type = other DNA
ttacatagtgagaagattgct

SEQ ID NO: 9368 - DNA, 21 bp, synthetic construct
  source 1..21: mol_type = other DNA
gagggtcgtgagtataaggaa

SEQ ID NO: 9369 - DNA, 21 bp, synthetic construct
  source 1..21: mol_type = other DNA
ggcgtaacaaaccaaacgcga

SEQ ID NO: 9370 - DNA, 21 bp, synthetic construct
  source 1..21: mol_type = other DNA
agtagttttactgctaattat

SEQ ID NO: 9371 - DNA, 21 bp, synthetic construct
  source 1..21: mol_type = other DNA
ttactagactcaaggcctgcc

SEQ ID NO: 9372 - DNA, 21 bp, synthetic construct
  source 1..21: mol_type = other DNA
atgcatcttgtttcgacgcct

SEQ ID NO: 9373 - DNA, 21 bp, synthetic construct
  source 1..21: mol_type = other DNA
gagcagcgtttgcaggttccg

SEQ ID NO: 9374 - DNA, 21 bp, synthetic construct
  source 1..21: mol_type = other DNA
acggctgcgtaatctgagagg

SEQ ID NO: 9375 - DNA, 21 bp, synthetic construct
  source 1..21: mol_type = other DNA
cggggggtcgtggttaacacg

SEQ ID NO: 9376 - DNA, 21 bp, synthetic construct
  source 1..21: mol_type = other DNA
ttcatggacactctataatcc

SEQ ID NO: 9377 - DNA, 21 bp, synthetic construct
  source 1..21: mol_type = other DNA
gaaaaaccatcgccctcagtg

SEQ ID NO: 9378 - DNA, 21 bp, synthetic construct
  source 1..21: mol_type = other DNA
ggtagtagtgggtcggagagg

SEQ ID NO: 9379 - DNA, 21 bp, synthetic construct
  source 1..21: mol_type = other DNA
tagcatcttgtttcgacgcct

SEQ ID NO: 9380 - DNA, 21 bp, synthetic construct
  source 1..21: mol_type = other DNA
accggcggcgacggggtaatg

SEQ ID NO: 9381 - DNA, 21 bp, synthetic construct
  source 1..21: mol_type = other DNA
aggattgaggaggctgttggt

SEQ ID NO: 9382 - DNA, 21 bp, synthetic construct
  source 1..21: mol_type = other DNA
ggatgcgtcgaagttcaaagt

SEQ ID NO: 9383 - DNA, 21 bp, synthetic construct
  source 1..21: mol_type = other DNA
actgagattggggtggggacg

SEQ ID NO: 9384 - DNA, 21 bp, synthetic construct
  source 1..21: mol_type = other DNA
caccaagccagagttatccaa

SEQ ID NO: 9385 - DNA, 21 bp, synthetic construct
  source 1..21: mol_type = other DNA
ggtaagatgcagtatggggaa

SEQ ID NO: 9386 - DNA, 21 bp, synthetic construct
  source 1..21: mol_type = other DNA
agctcggtaatcatggaaacg

SEQ ID NO: 9387 - DNA, 21 bp, synthetic construct
  source 1..21: mol_type = other DNA
gcggtagcaaacgagccaatg

SEQ ID NO: 9388 - DNA, 21 bp, synthetic construct
  source 1..21: mol_type = other DNA
tctaatcagactacgagtcgg

SEQ ID NO: 9389 - DNA, 21 bp, synthetic construct
  source 1..21: mol_type = other DNA
gatacacgaatgcacgtggga

SEQ ID NO: 9390 - DNA, 21 bp, synthetic construct
  source 1..21: mol_type = other DNA
ggtaagatgcagaatggggat

SEQ ID NO: 9391 - DNA, 21 bp, synthetic construct
  source 1..21: mol_type = other DNA
tttcatagtgagaagaatgct

SEQ ID NO: 9392 - DNA, 21 bp, synthetic construct
  source 1..21: mol_type = other DNA
atttatcagaaagctatgact

SEQ ID NO: 9393 - DNA, 21 bp, synthetic construct
  source 1..21: mol_type = other DNA
aatatgtctcagggtcggagt

SEQ ID NO: 9394 - DNA, 21 bp, synthetic construct
  source 1..21: mol_type = other DNA
gaaggcgcactacacacgcgc

SEQ ID NO: 9395 - DNA, 21 bp, synthetic construct
  source 1..21: mol_type = other DNA
gctcacgaaataaacgtggac

SEQ ID NO: 9396 - DNA, 21 bp, synthetic construct
  source 1..21: mol_type = other DNA
ggtaagatgcagtaaggggat

SEQ ID NO: 9397 - DNA, 21 bp, synthetic construct
  source 1..21: mol_type = other DNA
acgcttcctggggaggttgcg

SEQ ID NO: 9398 - DNA, 21 bp, synthetic construct
  source 1..21: mol_type = other DNA
attgtgaaggtggctcctgct

SEQ ID NO: 9399 - DNA, 21 bp, synthetic construct
  source 1..21: mol_type = other DNA
ctttttggtggggttgctgag

SEQ ID NO: 9400 - DNA, 21 bp, synthetic construct
  source 1..21: mol_type = other DNA
tctgacttacaacgcgagaca

SEQ ID NO: 9401 - DNA, 21 bp, synthetic construct
  source 1..21: mol_type = other DNA
aggattgaggtggctgatggt

SEQ ID NO: 9402 - DNA, 21 bp, synthetic construct
  source 1..21: mol_type = other DNA
gatactaagagtgagacgatg

SEQ ID NO: 9403 - DNA, 21 bp, synthetic construct
  source 1..21: mol_type = other DNA
ccctcatctcacttcaccgca

SEQ ID NO: 9404 - DNA, 21 bp, synthetic construct
  source 1..21: mol_type = other DNA
ccttctatgcaaggtgctggg

SEQ ID NO: 9405 - DNA, 21 bp, synthetic construct
  source 1..21: mol_type = other DNA
gggctgattaagaatgatact

SEQ ID NO: 9406 - DNA, 21 bp, synthetic construct
  source 1..21: mol_type = other DNA
gagaggggtgataatatgctt

SEQ ID NO: 9407 - DNA, 21 bp, synthetic construct
  source 1..21: mol_type = other DNA
aatgtgcaggtggctcctgct

SEQ ID NO: 9408 - DNA, 21 bp, synthetic construct
  source 1..21: mol_type = other DNA
ctggggattagttatgcggag

SEQ ID NO: 9409 - DNA, 21 bp, synthetic construct
  source 1..21: mol_type = other DNA
tctaatcagtctacgagacgg

SEQ ID NO: 9410 - DNA, 21 bp, synthetic construct
  source 1..21: mol_type = other DNA
ttgcgttctgttcctttgtgt

SEQ ID NO: 9411 - DNA, 21 bp, synthetic construct
  source 1..21: mol_type = other DNA
tccggcggcgtcggggtaatg

SEQ ID NO: 9412 - DNA, 21 bp, synthetic construct
  source 1..21: mol_type = other DNA
tcgcccctcgtatcacggata

SEQ ID NO: 9413 - DNA, 21 bp, synthetic construct
  source 1..21: mol_type = other DNA
actggagacggtagccacgca

SEQ ID NO: 9414 - DNA, 21 bp, synthetic construct
  source 1..21: mol_type = other DNA
accactggagaacacggtggc

SEQ ID NO: 9415 - DNA, 21 bp, synthetic construct
  source 1..21: mol_type = other DNA
gccggcggcgtcggggtaatg

SEQ ID NO: 9416 - DNA, 21 bp, synthetic construct
  source 1..21: mol_type = other DNA
tcttacaccacatcgttagcg

SEQ ID NO: 9417 - DNA, 21 bp, synthetic construct
  source 1..21: mol_type = other DNA
gacagccggttcatcagttac

SEQ ID NO: 9418 - DNA, 21 bp, synthetic construct
  source 1..21: mol_type = other DNA
gtcgtaaacaacacatctagg

SEQ ID NO: 9419 - DNA, 21 bp, synthetic construct
  source 1..21: mol_type = other DNA
accgcagacagctaccaaatg

SEQ ID NO: 9420 - DNA, 21 bp, synthetic construct
  source 1..21: mol_type = other DNA
acggttcctggggaggttgtg

SEQ ID NO: 9421 - DNA, 21 bp, synthetic construct
  source 1..21: mol_type = other DNA
gtgtcgaaatcgggtggtctt

SEQ ID NO: 9422 - DNA, 21 bp, synthetic construct
  source 1..21: mol_type = other DNA
aatacgggtaatgttggtaga

SEQ ID NO: 9423 - DNA, 21 bp, synthetic construct
  source 1..21: mol_type = other DNA
acttacaccacatcgttcgcg

SEQ ID NO: 9424 - DNA, 21 bp, synthetic construct
  source 1..21: mol_type = other DNA
actattgatgctaggggtggt

SEQ ID NO: 9425 - DNA, 21 bp, synthetic construct
  source 1..21: mol_type = other DNA
agctcggtaatccaggaaacg

SEQ ID NO: 9426 - DNA, 21 bp, synthetic construct
  source 1..21: mol_type = other DNA
attgagcaggtggctcctgct

SEQ ID NO: 9427 - DNA, 21 bp, synthetic construct
  source 1..21: mol_type = other DNA
gatgatcgtagaggtgctcag

SEQ ID NO: 9428 - DNA, 21 bp, synthetic construct
  source 1..21: mol_type = other DNA
gcggttaattctgtgccgcgt

SEQ ID NO: 9429 - DNA, 21 bp, synthetic construct
  source 1..21: mol_type = other DNA
gtgcagcgtttgcaggatccg

SEQ ID NO: 9430 - DNA, 21 bp, synthetic construct
  source 1..21: mol_type = other DNA
gtggcgttggcgggtaggggg

SEQ ID NO: 9431 - DNA, 21 bp, synthetic construct
  source 1..21: mol_type = other DNA
tccaacaacttgactctcccg

SEQ ID NO: 9432 - DNA, 21 bp, synthetic construct
  source 1..21: mol_type = other DNA
actcaggtgtctaggactggg

SEQ ID NO: 9433 - DNA, 21 bp, synthetic construct
  source 1..21: mol_type = other DNA
agagtgacgattccttctggg

SEQ ID NO: 9434 - DNA, 21 bp, synthetic construct
  source 1..21: mol_type = other DNA
gtgcagcgtatgcaggttccg

SEQ ID NO: 9435 - DNA, 21 bp, synthetic construct
  source 1..21: mol_type = other DNA
tctaacaccacatcgttcgcg

SEQ ID NO: 9436 - DNA, 21 bp, synthetic construct
  source 1..21: mol_type = other DNA
gcgggtcttgatcatacggtt

SEQ ID NO: 9437 - DNA, 21 bp, synthetic construct
  source 1..21: mol_type = other DNA
gacggggtccacagacattca

SEQ ID NO: 9438 - RNA, 21 nt, synthetic construct
  source 1..21: mol_type = other RNA
  ncRNA 1..21: ncRNA_class = other; note = mRNA
gctggtattaagggtagtggt

SEQ ID NO: 9439 - DNA, 21 bp, synthetic construct
  source 1..21: mol_type = other DNA
ggtaagatgcagtatgtggat

SEQ ID NO: 9440 - DNA, 21 bp, synthetic construct
  source 1..21: mol_type = other DNA
gctacacgattgcacgtggga

SEQ ID NO: 9441 - DNA, 21 bp, synthetic construct
  source 1..21: mol_type = other DNA
gctattgctaatagatctatt

SEQ ID NO: 9442 - DNA, 21 bp, synthetic construct
  source 1..21: mol_type = other DNA
aatacgggtaatgatggtagt

SEQ ID NO: 9443 - DNA, 21 bp, synthetic construct
  source 1..21: mol_type = other DNA
agtagttttcctgctaattaa

SEQ ID NO: 9444 - DNA, 21 bp, synthetic construct
  source 1..21: mol_type = other DNA
attgtgcaggaggctcctgct

SEQ ID NO: 9445 - DNA, 21 bp, synthetic construct
  source 1..21: mol_type = other DNA
cgtccggtgcagcgtgagaat

SEQ ID NO: 9446 - DNA, 21 bp, synthetic construct
  source 1..21: mol_type = other DNA
gtgcagcgtttgcaggttacg

SEQ ID NO: 9447 - DNA, 21 bp, synthetic construct
  source 1..21: mol_type = other DNA
ttgcgttctcttcctttgggt

SEQ ID NO: 9448 - DNA, 21 bp, synthetic construct
  source 1..21: mol_type = other DNA
ggcaacggagatatctctggt

SEQ ID NO: 9449 - DNA, 21 bp, synthetic construct
  source 1..21: mol_type = other DNA
tcggatttgatggggaaggct

SEQ ID NO: 9450 - DNA, 21 bp, synthetic construct
  source 1..21: mol_type = other DNA
aataatggtacgttgatttct

SEQ ID NO: 9451 - DNA, 21 bp, synthetic construct
  source 1..21: mol_type = other DNA
gggagttagattccgctgagg

SEQ ID NO: 9452 - DNA, 21 bp, synthetic construct
  source 1..21: mol_type = other DNA
attggtcgtatgagaggtaat

SEQ ID NO: 9453 - DNA, 21 bp, synthetic construct
  source 1..21: mol_type = other DNA
ctttttggtggggatgctgcg

SEQ ID NO: 9454 - DNA, 21 bp, synthetic construct
  source 1..21: mol_type = other DNA
ataggatcgacttacgaatca

SEQ ID NO: 9455 - DNA, 21 bp, synthetic construct
  source 1..21: mol_type = other DNA
attatgactcagggtcggagt

SEQ ID NO: 9456 - DNA, 21 bp, synthetic construct
  source 1..21: mol_type = other DNA
ctggggattagtaatgcggcg

SEQ ID NO: 9457 - DNA, 21 bp, synthetic construct
  source 1..21: mol_type = other DNA
gctcacgaaataaacggggaa

SEQ ID NO: 9458 - DNA, 21 bp, synthetic construct
  source 1..21: mol_type = other DNA
aatggtcgtatgagtggtaat

SEQ ID NO: 9459 - DNA, 21 bp, synthetic construct
  source 1..21: mol_type = other DNA
acgcctgcgtattctgagagg

SEQ ID NO: 9460 - DNA, 21 bp, synthetic construct
  source 1..21: mol_type = other DNA
gctacacgaatgcacctggga

SEQ ID NO: 9461 - DNA, 21 bp, synthetic construct
  source 1..21: mol_type = other DNA
ggtaagatgcagcatggggat

SEQ ID NO: 9462 - DNA, 21 bp, synthetic construct
  source 1..21: mol_type = other DNA
tacatcgacacccgttccatg

SEQ ID NO: 9463 - DNA, 21 bp, synthetic construct
  source 1..21: mol_type = other DNA
agaaatggtcctgctcctggg

SEQ ID NO: 9464 - DNA, 21 bp, synthetic construct
  source 1..21: mol_type = other DNA
agaagttttcctgctaattat

SEQ ID NO: 9465 - DNA, 21 bp, synthetic construct
  source 1..21: mol_type = other DNA
agtaatggtcatgctcctggg

SEQ ID NO: 9466 - DNA, 21 bp, synthetic construct
  source 1..21: mol_type = other DNA
tttagttctgtgggtatggcg

SEQ ID NO: 9467 - DNA, 21 bp, synthetic construct
  source 1..21: mol_type = other DNA
aacagcgaaagcggaggctca

SEQ ID NO: 9468 - DNA, 21 bp, synthetic construct
  source 1..21: mol_type = other DNA
acggttttgatggggaaggct

SEQ ID NO: 9469 - DNA, 21 bp, synthetic construct
  source 1..21: mol_type = other DNA
gacaaaatggaggtccttgcc

SEQ ID NO: 9470 - DNA, 21 bp, synthetic construct
  source 1..21: mol_type = other DNA
acggctgcggattctgagagg

SEQ ID NO: 9471 - DNA, 21 bp, synthetic construct
  source 1..21: mol_type = other DNA
gacggacaagccggagaaagc

SEQ ID NO: 9472 - DNA, 21 bp, synthetic construct
  source 1..21: mol_type = other DNA
attatgtctcagcgtcggagt

SEQ ID NO: 9473 - DNA, 21 bp, synthetic construct
  source 1..21: mol_type = other DNA
ccttctatgaatggtgctggg

SEQ ID NO: 9474 - DNA, 21 bp, synthetic construct
  source 1..21: mol_type = other DNA
gcagacaccacgcaaccaagg

SEQ ID NO: 9475 - DNA, 21 bp, synthetic construct
  source 1..21: mol_type = other DNA
attggtcgtatgagtggtaaa

SEQ ID NO: 9476 - DNA, 21 bp, synthetic construct
  source 1..21: mol_type = other DNA
gacggaggaggtaaagatgta

SEQ ID NO: 9477 - DNA, 21 bp, synthetic construct
  source 1..21: mol_type = other DNA
ggatcggtcgaagttcaaagt

SEQ ID NO: 9478 - DNA, 21 bp, synthetic construct
  source 1..21: mol_type = other DNA
gggagttcgattcagctgagg

SEQ ID NO: 9479 - DNA, 21 bp, synthetic construct
  source 1..21: mol_type = other DNA
tctgatctgggtagtagtgtg

SEQ ID NO: 9480 - DNA, 21 bp, synthetic construct
  source 1..21: mol_type = other DNA
accggcggcgtcgggggaatg

SEQ ID NO: 9481 - DNA, 21 bp, synthetic construct
  source 1..21: mol_type = other DNA
accggcggcgtcggggtattg

SEQ ID NO: 9482 - DNA, 21 bp, synthetic construct
  source 1..21: mol_type = other DNA
gctacacgaatgctcgtggga

SEQ ID NO: 9483 - DNA, 21 bp, synthetic construct
  source 1..21: mol_type = other DNA
ggcgtaacataacaaacgcga

SEQ ID NO: 9484 - DNA, 21 bp, synthetic construct
  source 1..21: mol_type = other DNA
gagaggggtgataatttgatt

SEQ ID NO: 9485 - DNA, 21 bp, synthetic construct
  source 1..21: mol_type = other DNA
gcggttaatgctgtgctgcgt

SEQ ID NO: 9486 - DNA, 21 bp, synthetic construct
  source 1..21: mol_type = other DNA
gtaaaaccatcgcccacagtg

SEQ ID NO: 9487 - DNA, 21 bp, synthetic construct
  source 1..21: mol_type = other DNA
tttaatagtgagaagattgct

SEQ ID NO: 9488 - DNA, 21 bp, synthetic construct
  source 1..21: mol_type = other DNA
gctacacgaatgcacgtgcga

SEQ ID NO: 9489 - DNA, 21 bp, synthetic construct
  source 1..21: mol_type = other DNA
accggcgcaagagacagttaa

SEQ ID NO: 9490 - DNA, 21 bp, synthetic construct
  source 1..21: mol_type = other DNA
attaagtctcagggtcggagt

SEQ ID NO: 9491 - DNA, 21 bp, synthetic construct
  source 1..21: mol_type = other DNA
taactagactcatggcctgcc

SEQ ID NO: 9492 - DNA, 21 bp, synthetic construct
  source 1..21: mol_type = other DNA
tcacacgccactgctgcccta

SEQ ID NO: 9493 - DNA, 21 bp, synthetic construct
  source 1..21: mol_type = other DNA
ttactagactcatgtcctgcc

SEQ ID NO: 9494 - DNA, 21 bp, synthetic construct
  source 1..21: mol_type = other DNA
ccctcatctcacttccacgca

SEQ ID NO: 9495 - DNA, 21 bp, synthetic construct
  source 1..21: mol_type = other DNA
gacggggtccacagacctaca

SEQ ID NO: 9496 - DNA, 21 bp, synthetic construct
  source 1..21: mol_type = other DNA
gtggatggtaggattaataga

SEQ ID NO: 9497 - DNA, 21 bp, synthetic construct
  source 1..21: mol_type = other DNA
cacatggcgggcggtctcggg

SEQ ID NO: 9498 - DNA, 21 bp, synthetic construct
  source 1..21: mol_type = other DNA
ctggggattagttattcggcg

SEQ ID NO: 9499 - DNA, 21 bp, synthetic construct
  source 1..21: mol_type = other DNA
gaggttggtatgattaatagt

SEQ ID NO: 9500 - DNA, 21 bp, synthetic construct
  source 1..21: mol_type = other DNA
ggattacaattccacagcgcc

SEQ ID NO: 9501 - DNA, 21 bp, synthetic construct
  source 1..21: mol_type = other DNA
agttttcctagagttgggtct

SEQ ID NO: 9502 - DNA, 21 bp, synthetic construct
  source 1..21: mol_type = other DNA
ctggggcaatccagagtaggc

SEQ ID NO: 9503 - DNA, 21 bp, synthetic construct
  source 1..21: mol_type = other DNA
ttgcatcatgtttcgacgcct

SEQ ID NO: 9504 - DNA, 21 bp, synthetic construct
  source 1..21: mol_type = other DNA
actggagtcggtagcaacgca

SEQ ID NO: 9505 - DNA, 21 bp, synthetic construct
  source 1..21: mol_type = other DNA
agccaccaagacacgcaagga

SEQ ID NO: 9506 - DNA, 21 bp, synthetic construct
  source 1..21: mol_type = other DNA
agatcgggtctggcgaatggt

SEQ ID NO: 9507 - DNA, 21 bp, synthetic construct
  source 1..21: mol_type = other DNA
ggcgaaacataccaaacgcga

SEQ ID NO: 9508 - DNA, 21 bp, synthetic construct
  source 1..21: mol_type = other DNA
acgccgcagggtcctaagcct

SEQ ID NO: 9509 - DNA, 21 bp, synthetic construct
  source 1..21: mol_type = other DNA
acttatgatgctaggggtggt

SEQ ID NO: 9510 - DNA, 21 bp, synthetic construct
  source 1..21: mol_type = other DNA
cagaatgggccgacgagacgg

SEQ ID NO: 9511 - DNA, 21 bp, synthetic construct
  source 1..21: mol_type = other DNA
cggggggtcgtggataactcg

SEQ ID NO: 9512 - DNA, 21 bp, synthetic construct
  source 1..21: mol_type = other DNA
tcgctggaggggcataagcag

SEQ ID NO: 9513 - DNA, 21 bp, synthetic construct
  source 1..21: mol_type = other DNA
gcggtttatgctgtgccgcgt

SEQ ID NO: 9514 - DNA, 21 bp, synthetic construct
  source 1..21: mol_type = other DNA
gtgcagcgtttgcaggttcag

SEQ ID NO: 9515 - DNA, 21 bp, synthetic construct
  source 1..21: mol_type = other DNA
gtggctagggagatggggaga

SEQ ID NO: 9516 - DNA, 21 bp, synthetic construct
  source 1..21: mol_type = other DNA
tatcatgagcgggttccgatg

SEQ ID NO: 9517 - DNA, 21 bp, synthetic construct
  source 1..21: mol_type = other DNA
ggtagtagagggtcggtgagg

SEQ ID NO: 9518 - DNA, 21 bp, synthetic construct
  source 1..21: mol_type = other DNA
accggcggcgtcggggaaatg

SEQ ID NO: 9519 - DNA, 21 bp, synthetic construct
  source 1..21: mol_type = other DNA
ccctcatctcacttacccgca

SEQ ID NO: 9520 - DNA, 21 bp, synthetic construct
  source 1..21: mol_type = other DNA
cgtgtagcactgacagaggga

SEQ ID NO: 9521 - DNA, 21 bp, synthetic construct
  source 1..21: mol_type = other DNA
ctttttggtggggttgatgcg

SEQ ID NO: 9522 - DNA, 21 bp, synthetic construct
  source 1..21: mol_type = other DNA
gcaggcgtctaccgcgccgcc

SEQ ID NO: 9523 - RNA, 21 nt, synthetic construct
  source 1..21: mol_type = other RNA
  ncRNA 1..21: ncRNA_class = other; note = mRNA
attatgtctcagggtctgagt

SEQ ID NO: 9524 - DNA, 21 bp, synthetic construct
  source 1..21: mol_type = other DNA
tcttacaccacatcgttcgag

SEQ ID NO: 9525 - DNA, 21 bp, synthetic construct
  source 1..21: mol_type = other DNA
ttactagactcatggactgcc

SEQ ID NO: 9526 - DNA, 21 bp, synthetic construct
  source 1..21: mol_type = other DNA
ttgcgtactgttcctttgggt

SEQ ID NO: 9527 - DNA, 21 bp, synthetic construct
  source 1..21: mol_type = other DNA
acggatgcgtattctgagagg

SEQ ID NO: 9528 - DNA, 21 bp, synthetic construct
  source 1..21: mol_type = other DNA
gacagccggttcatcagtacc

SEQ ID NO: 9529 - DNA, 21 bp, synthetic construct
  source 1..21: mol_type = other DNA
gctacacgaatgcgcgtggga

SEQ ID NO: 9530 - DNA, 21 bp, synthetic construct
  source 1..21: mol_type = other DNA
gggttgacgcgtttgactgat

SEQ ID NO: 9531 - DNA, 21 bp, synthetic construct
  source 1..21: mol_type = other DNA
agtagtattcctgctaattat

SEQ ID NO: 9532 - DNA, 21 bp, synthetic construct
  source 1..21: mol_type = other DNA
agtagttttcctgctaataat

SEQ ID NO: 9533 - DNA, 21 bp, synthetic construct
  source 1..21: mol_type = other DNA
attatgtctaagggtcggagt

SEQ ID NO: 9534 - DNA, 21 bp, synthetic construct
  source 1..21: mol_type = other DNA
gcgggtaatgctgtgccgcgt

SEQ ID NO: 9535 - DNA, 21 bp, synthetic construct
  source 1..21: mol_type = other DNA
gctcaagaaataaacggggac

SEQ ID NO: 9536 - DNA, 21 bp, synthetic construct
  source 1..21: mol_type = other DNA
ttgcgttctgttccttttggt

SEQ ID NO: 9537 - DNA, 21 bp, synthetic construct
  source 1..21: mol_type = other DNA
gagggtcgtgagaataaggat

SEQ ID NO: 9538 - DNA, 21 bp, synthetic construct
  source 1..21: mol_type = other DNA
gcttatgtgtcggatcagtcg

SEQ ID NO: 9539 - DNA, 21 bp, synthetic construct
  source 1..21: mol_type = other DNA
gtggtttctaggaatattaga

SEQ ID NO: 9540 - DNA, 21 bp, synthetic construct
  source 1..21: mol_type = other DNA
gtgtcgaattcgggtggtcat

SEQ ID NO: 9541 - DNA, 21 bp, synthetic construct
  source 1..21: mol_type = other DNA
tccactggagaacacgctggc

SEQ ID NO: 9542 - DNA, 21 bp, synthetic construct
  source 1..21: mol_type = other DNA
aagaggagtggtgtgtcggag

SEQ ID NO: 9543 - DNA, 21 bp, synthetic construct
  source 1..21: mol_type = other DNA
cacaactccgcaaagaacgaa

SEQ ID NO: 9544 - DNA, 21 bp, synthetic construct
  source 1..21: mol_type = other DNA
cactcatctcacttccccgca

SEQ ID NO: 9545 - DNA, 21 bp, synthetic construct
  source 1..21: mol_type = other DNA
actggagtcggtagccccgca

SEQ ID NO: 9546 - DNA, 21 bp, synthetic construct
  source 1..21: mol_type = other DNA
actttagatgctaggggtggt

SEQ ID NO: 9547 - DNA, 21 bp, synthetic construct
  source 1..21: mol_type = other DNA
ccggctgcgtattctgagagg

SEQ ID NO: 9548 - DNA, 21 bp, synthetic construct
  source 1..21: mol_type = other DNA
ctttttgttggggttgctgcg

SEQ ID NO: 9549 - DNA, 21 bp, synthetic construct
  source 1..21: mol_type = other DNA
gctgcacgaatgcacgtggga

SEQ ID NO: 9550 - DNA, 21 bp, synthetic construct
  source 1..21: mol_type = other DNA
tacatggacaccagttccatg

SEQ ID NO: 9551 - DNA, 21 bp, synthetic construct
  source 1..21: mol_type = other DNA
tacatggacacccgttacatg

SEQ ID NO: 9552 - DNA, 21 bp, synthetic construct
  source 1..21: mol_type = other DNA
aataatggtaagttgctttct

SEQ ID NO: 9553 - DNA, 21 bp, synthetic construct
  source 1..21: mol_type = other DNA
ggattacaataccccagcgcc

SEQ ID NO: 9554 - DNA, 21 bp, synthetic construct
  source 1..21: mol_type = other DNA
tctgatcggcgtagtagtgtg

SEQ ID NO: 9555 - DNA, 21 bp, synthetic construct
  source 1..21: mol_type = other DNA
tcttcggttcatgtgattgag

SEQ ID NO: 9556 - DNA, 21 bp, synthetic construct
  source 1..21: mol_type = other DNA
agtggggtccactccgacctg

SEQ ID NO: 9557 - DNA, 21 bp, synthetic construct
  source 1..21: mol_type = other DNA
agtggggtccactccgtccag

SEQ ID NO: 9558 - DNA, 21 bp, synthetic construct
  source 1..21: mol_type = other DNA
cggggggtcgtggttaaatcg

SEQ ID NO: 9559 - DNA, 21 bp, synthetic construct
  source 1..21: mol_type = other DNA
ggatgggtcgaagttcgaagt

SEQ ID NO: 9560 - DNA, 21 bp, synthetic construct
  source 1..21: mol_type = other DNA
gtgacgaattcgggtggtctt

SEQ ID NO: 9561 - DNA, 21 bp, synthetic construct
  source 1..21: mol_type = other DNA
atttatcagaatgatatgact

SEQ ID NO: 9562 - DNA, 21 bp, synthetic construct
  source 1..21: mol_type = other DNA
ggtaagaagcagtatggggat

SEQ ID NO: 9563 - DNA, 21 bp, synthetic construct
  source 1..21: mol_type = other DNA
ggtcatagtcgtgctgtgggt

SEQ ID NO: 9564 - DNA, 21 bp, synthetic construct
  source 1..21: mol_type = other DNA
aatctgcagagtctgactcag

SEQ ID NO: 9565 - DNA, 21 bp, synthetic construct
  source 1..21: mol_type = other DNA
cggggggtcgtggttatctcg

SEQ ID NO: 9566 - DNA, 21 bp, synthetic construct
  source 1..21: mol_type = other DNA
cttttttgtggggttgctgcg

SEQ ID NO: 9567 - DNA, 21 bp, synthetic construct
  source 1..21: mol_type = other DNA
gttcttgatgaggagcttctg

SEQ ID NO: 9568 - DNA, 21 bp, synthetic construct
  source 1..21: mol_type = other DNA
tttagttctgtgggtatgagg

SEQ ID NO: 9569 - DNA, 21 bp, synthetic construct
  source 1..21: mol_type = other DNA
accggcacagtaatatcacac

SEQ ID NO: 9570 - DNA, 21 bp, synthetic construct
  source 1..21: mol_type = other DNA
cactacgaggtaggtggcgcg

SEQ ID NO: 9571 - DNA, 21 bp, synthetic construct
  source 1..21: mol_type = other DNA
catctgggggtactggtatgg

SEQ ID NO: 9572 - DNA, 21 bp, synthetic construct
  source 1..21: mol_type = other DNA
ggtcctagtcgtgctgagggt

SEQ ID NO: 9573 - DNA, 21 bp, synthetic construct
  source 1..21: mol_type = other DNA
tatcatgagcgggttccgtag

SEQ ID NO: 9574 - DNA, 21 bp, synthetic construct
  source 1..21: mol_type = other DNA
actaatcagtctacgagtcgg

SEQ ID NO: 9575 - DNA, 21 bp, synthetic construct
  source 1..21: mol_type = other DNA
agtagttttcctgataattat

SEQ ID NO: 9576 - DNA, 21 bp, synthetic construct
  source 1..21: mol_type = other DNA
cgtgattctgggaagagttag

SEQ ID NO: 9577 - DNA, 21 bp, synthetic construct
  source 1..21: mol_type = other DNA
gaaggcgcacaacacacgggc

SEQ ID NO: 9578 - DNA, 21 bp, synthetic construct
  source 1..21: mol_type = other DNA
gggagatcgattccgctgagg

SEQ ID NO: 9579 - DNA, 21 bp, synthetic construct
  source 1..21: mol_type = other DNA
ttgcgttctgttcctttggtt

SEQ ID NO: 9580 - DNA, 21 bp, synthetic construct
  source 1..21: mol_type = other DNA
cggggggacgtggttaactcg

SEQ ID NO: 9581 - DNA, 21 bp, synthetic construct
  source 1..21: mol_type = other DNA
gacttaaactacggacctggc

SEQ ID NO: 9582 - DNA, 21 bp, synthetic construct
  source 1..21: mol_type = other DNA
gacaaaatggtggtccttgac

SEQ ID NO: 9583 - DNA, 21 bp, synthetic construct
  source 1..21: mol_type = other DNA
ggtgtttacggagctatagac

SEQ ID NO: 9584 - DNA, 21 bp, synthetic construct
  source 1..21: mol_type = other DNA
accgcagcccgctaccaaatg

SEQ ID NO: 9585 - DNA, 21 bp, synthetic construct
  source 1..21: mol_type = other DNA
cagccgtctgtgggtgcgaga

SEQ ID NO: 9586 - DNA, 21 bp, synthetic construct
  source 1..21: mol_type = other DNA
ctggggagtagttatgcggcg

SEQ ID NO: 9587 - DNA, 21 bp, synthetic construct
  source 1..21: mol_type = other DNA
gctcacgaaataaacgggggc

SEQ ID NO: 9588 - DNA, 21 bp, synthetic construct
  source 1..21: mol_type = other DNA
gctcacgatataaacggggac

SEQ ID NO: 9589 - DNA, 21 bp, synthetic construct
  source 1..21: mol_type = other DNA
gctcacggaataaacggggac

SEQ ID NO: 9590 - DNA, 21 bp, synthetic construct
  source 1..21: mol_type = other DNA
gtgcagcgttagcaggttccg

SEQ ID NO: 9591 - DNA, 21 bp, synthetic construct
  source 1..21: mol_type = other DNA
tcttacaccacatcgttctcg

SEQ ID NO: 9592 - DNA, 21 bp, synthetic construct
  source 1..21: mol_type = other DNA
ttactagacacatggcctgcc

SEQ ID NO: 9593 - DNA, 21 bp, synthetic construct
  source 1..21: mol_type = other DNA
ctttttggtgtggttgctgcg

SEQ ID NO: 9594 - DNA, 21 bp, synthetic construct
  source 1..21: mol_type = other DNA
gctaatgggtcggatcagtcg

SEQ ID NO: 9595 - DNA, 21 bp, synthetic construct
  source 1..21: mol_type = other DNA
ttgcatcttgtttagacgcct

SEQ ID NO: 9596 - DNA, 21 bp, synthetic construct
  source 1..21: mol_type = other DNA
tttagttctgtgggtatgatg

SEQ ID NO: 9597 - DNA, 21 bp, synthetic construct
  source 1..21: mol_type = other DNA
caaccagtcgctgctctccca

SEQ ID NO: 9598 - DNA, 21 bp, synthetic construct
  source 1..21: mol_type = other DNA
gctacacgaatgcacgtggta

SEQ ID NO: 9599 - DNA, 21 bp, synthetic construct
  source 1..21: mol_type = other DNA
gctacacgaatgcacgtgtga

SEQ ID NO: 9600 - DNA, 21 bp, synthetic construct
  source 1..21: mol_type = other DNA
agtaaaggtcctgctcctggg

SEQ ID NO: 9601 - DNA, 21 bp, synthetic construct
  source 1..21: mol_type = other DNA
caagacggagtcaacaacggc

SEQ ID NO: 9602 - DNA, 21 bp, synthetic construct
  source 1..21: mol_type = other DNA
cgtggtgatagatatggggcg

SEQ ID NO: 9603 - DNA, 21 bp, synthetic construct
  source 1..21: mol_type = other DNA
gaggctagggagatggggagt

SEQ ID NO: 9604 - DNA, 21 bp, synthetic construct
  source 1..21: mol_type = other DNA
aaggttcctggggaggttgcg

SEQ ID NO: 9605 - DNA, 21 bp, synthetic construct
  source 1..21: mol_type = other DNA
actctggtgactaggactggg

SEQ ID NO: 9606 - DNA, 21 bp, synthetic construct
  source 1..21: mol_type = other DNA
gaggtttctaggaatattagt

SEQ ID NO: 9607 - DNA, 21 bp, synthetic construct
  source 1..21: mol_type = other DNA
gtggtttctaggattattagt

SEQ ID NO: 9608 - DNA, 21 bp, synthetic construct
  source 1..21: mol_type = other DNA
tccactcgagaacacggtggc

SEQ ID NO: 9609 - DNA, 21 bp, synthetic construct
  source 1..21: mol_type = other DNA
tctccgaatcgtccggcgcct

SEQ ID NO: 9610 - DNA, 21 bp, synthetic construct
  source 1..21: mol_type = other DNA
tttagttgtgtgggtatgacg

SEQ ID NO: 9611 - DNA, 21 bp, synthetic construct
  source 1..21: mol_type = other DNA
caacaagtcggtgctctccca

SEQ ID NO: 9612 - DNA, 21 bp, synthetic construct
  source 1..21: mol_type = other DNA
caaccagtcggtgctcaccca

SEQ ID NO: 9613 - DNA, 21 bp, synthetic construct
  source 1..21: mol_type = other DNA
ctgatttcgactactgagaat

SEQ ID NO: 9614 - DNA, 21 bp, synthetic construct
  source 1..21: mol_type = other DNA
ggtaagatgtagtatggggat

SEQ ID NO: 9615 - DNA, 21 bp, synthetic construct
  source 1..21: mol_type = other DNA
tctcagcttaatgagtctcat

SEQ ID NO: 9616 - DNA, 21 bp, synthetic construct
  source 1..21: mol_type = other DNA
aatctgcagagactgactctg

SEQ ID NO: 9617 - DNA, 21 bp, synthetic construct
  source 1..21: mol_type = other DNA
actcgagtcggtagccacgca

SEQ ID NO: 9618 - DNA, 21 bp, synthetic construct
  source 1..21: mol_type = other DNA
agtaatggtcctgctactggg

SEQ ID NO: 9619 - DNA, 21 bp, synthetic construct
  source 1..21: mol_type = other DNA
agtaatggtcctgctcatggg

SEQ ID NO: 9620 - DNA, 21 bp, synthetic construct
  source 1..21: mol_type = other DNA
attatgtctcagtgtcggagt

SEQ ID NO: 9621 - DNA, 21 bp, synthetic construct
  source 1..21: mol_type = other DNA
gatcacgaaataaacggggac

SEQ ID NO: 9622 - DNA, 21 bp, synthetic construct
  source 1..21: mol_type = other DNA
ggtcttacgactcagcctcct

SEQ ID NO: 9623 - DNA, 21 bp, synthetic construct
  source 1..21: mol_type = other DNA
ggtcttacgtctcagactcct

SEQ ID NO: 9624 - DNA, 21 bp, synthetic construct
  source 1..21: mol_type = other DNA
gtaaaaccatcgacctcagtg

SEQ ID NO: 9625 - DNA, 21 bp, synthetic construct
  source 1..21: mol_type = other DNA
attggtagtatgagtggtaat

SEQ ID NO: 9626 - DNA, 21 bp, synthetic construct
  source 1..21: mol_type = other DNA
cgggggtcgtggttaactcgg

SEQ ID NO: 9627 - DNA, 21 bp, synthetic construct
  source 1..21: mol_type = other DNA
gcttaagggtcggatcagtcg

SEQ ID NO: 9628 - DNA, 21 bp, synthetic construct
  source 1..21: mol_type = other DNA
gtgtagaattcgggtggtctt

SEQ ID NO: 9629 - DNA, 21 bp, synthetic construct
  source 1..21: mol_type = other DNA
ctaaaagaaacaagggtagca

SEQ ID NO: 9630 - DNA, 21 bp, synthetic construct
  source 1..21: mol_type = other DNA
gctacactaatgcacgtggga

SEQ ID NO: 9631 - DNA, 21 bp, synthetic construct
  source 1..21: mol_type = other DNA
tcgtctgctgctgctgatgct

SEQ ID NO: 9632 - DNA, 21 bp, synthetic construct
  source 1..21: mol_type = other DNA
tctggtcttcattcgcaggaa

SEQ ID NO: 9633 - DNA, 21 bp, synthetic construct
  source 1..21: mol_type = other DNA
ttgcgttctgttccttcgggt

SEQ ID NO: 9634 - DNA, 21 bp, synthetic construct
  source 1..21: mol_type = other DNA
cgggagctgaatatgaagtcg

SEQ ID NO: 9635 - DNA, 21 bp, synthetic construct
  source 1..21: mol_type = other DNA
ggctccaactcatcaaagcta

SEQ ID NO: 9636 - DNA, 21 bp, synthetic construct
  source 1..21: mol_type = other DNA
actcgtgatgctgatacggat

SEQ ID NO: 9637 - DNA, 21 bp, synthetic construct
  source 1..21: mol_type = other DNA
gctacaccaatgcacgtggga

SEQ ID NO: 9638 - DNA, 21 bp, synthetic construct
  source 1..21: mol_type = other DNA
ggacgaggcgaccacggagaa

SEQ ID NO: 9639 - DNA, 21 bp, synthetic construct
  source 1..21: mol_type = other DNA
agtagttttcctgctaaatat

SEQ ID NO: 9640 - DNA, 21 bp, synthetic construct
  source 1..21: mol_type = other DNA
aaggctgcgtattctgagagg

SEQ ID NO: 9641 - DNA, 21 bp, synthetic construct
  source 1..21: mol_type = other DNA
atcatggacactctattatcc

SEQ ID NO: 9642 - DNA, 21 bp, synthetic construct
  source 1..21: mol_type = other DNA
ttcatggacactctaatatcc

SEQ ID NO: 9643 - DNA, 21 bp, synthetic construct
  source 1..21: mol_type = other DNA
ttcgaccaaaaagcccatacg

SEQ ID NO: 9644 - DNA, 21 bp, synthetic construct
  source 1..21: mol_type = other DNA
accggcacagaaatatcaccc

SEQ ID NO: 9645 - DNA, 21 bp, synthetic construct
  source 1..21: mol_type = other DNA
agtgtgacgattcattctggg

SEQ ID NO: 9646 - DNA, 21 bp, synthetic construct
  source 1..21: mol_type = other DNA
gacagacggttcatcagttcc

SEQ ID NO: 9647 - DNA, 21 bp, synthetic construct
  source 1..21: mol_type = other DNA
gcagtcaccacgcaaccaagc

SEQ ID NO: 9648 - DNA, 21 bp, synthetic construct
  source 1..21: mol_type = other DNA
gggttgacgcgtttgactaaa

SEQ ID NO: 9649 - DNA, 21 bp, synthetic construct
  source 1..21: mol_type = other DNA
agtccggtgcagggtgagaat

SEQ ID NO: 9650 - DNA, 21 bp, synthetic construct
  source 1..21: mol_type = other DNA
atgatgcctaggagagcgatg

SEQ ID NO: 9651 - DNA, 21 bp, synthetic construct
  source 1..21: mol_type = other DNA
gactcgaacggctaaccgaca

SEQ ID NO: 9652 - DNA, 21 bp, synthetic construct
  source 1..21: mol_type = other DNA
gggagttcgattacgctgagg

SEQ ID NO: 9653 - DNA, 21 bp, synthetic construct
  source 1..21: mol_type = other DNA
acgacgcagggtcataagcct

SEQ ID NO: 9654 - DNA, 21 bp, synthetic construct
  source 1..21: mol_type = other DNA
atcacaaacaacacacgagtg

SEQ ID NO: 9655 - DNA, 21 bp, synthetic construct
  source 1..21: mol_type = other DNA
gagaggggtgataaattgctt

SEQ ID NO: 9656 - DNA, 21 bp, synthetic construct
  source 1..21: mol_type = other DNA
gcttatgggtaggatcagtcg

SEQ ID NO: 9657 - DNA, 21 bp, synthetic construct
  source 1..21: mol_type = other DNA
atttataagaatgctatgact

SEQ ID NO: 9658 - DNA, 21 bp, synthetic construct
  source 1..21: mol_type = other DNA
gatggtattacgggtagtggt

SEQ ID NO: 9659 - DNA, 21 bp, synthetic construct
  source 1..21: mol_type = other DNA
gctaaacgaatgcacgtggga

SEQ ID NO: 9660 - DNA, 21 bp, synthetic construct
  source 1..21: mol_type = other DNA
agtagatttcctgctaattat

SEQ ID NO: 9661 - DNA, 21 bp, synthetic construct
  source 1..21: mol_type = other DNA
ggggttttgagttctgaggat

SEQ ID NO: 9662 - DNA, 21 bp, synthetic construct
  source 1..21: mol_type = other DNA
attggtcgtaagagtggtaat

SEQ ID NO: 9663 - DNA, 21 bp, synthetic construct
  source 1..21: mol_type = other DNA
ggatgggtctaagttcaaagt

SEQ ID NO: 9664 - DNA, 21 bp, synthetic construct
  source 1..21: mol_type = other DNA
accggcggcggcggggtaatg

SEQ ID NO: 9665 - DNA, 21 bp, synthetic construct
  source 1..21: mol_type = other DNA
agttcgggtctggcgaaaggt

SEQ ID NO: 9666 - DNA, 21 bp, synthetic construct
  source 1..21: mol_type = other DNA
agttttcatagtgttgggtct

SEQ ID NO: 9667 - DNA, 21 bp, synthetic construct
  source 1..21: mol_type = other DNA
cttcgtgtggattatatggat

SEQ ID NO: 9668 - DNA, 21 bp, synthetic construct
  source 1..21: mol_type = other DNA
tctacacgaatgcacgtggga

SEQ ID NO: 9669 - DNA, 21 bp, synthetic construct
  source 1..21: mol_type = other DNA
tccaacaacttgcatctcccg

SEQ ID NO: 9670 - DNA, 21 bp, synthetic construct
  source 1..21: mol_type = other DNA
acggttcctgggaggttgcgg

SEQ ID NO: 9671 - DNA, 21 bp, synthetic construct
  source 1..21: mol_type = other DNA
gagggtcgtgagtataatgat

SEQ ID NO: 9672 - DNA, 21 bp, synthetic construct
  source 1..21: mol_type = other DNA
ttaatggacactctattatcc

SEQ ID NO: 9673 - DNA, 21 bp, synthetic construct
  source 1..21: mol_type = other DNA
aacagagtaagcggaggctca

SEQ ID NO: 9674 - DNA, 21 bp, synthetic construct
  source 1..21: mol_type = other DNA
actcgtgttgatgatacggat

SEQ ID NO: 9675 - DNA, 21 bp, synthetic construct
  source 1..21: mol_type = other DNA
ataggatcgactaacgtatca

SEQ ID NO: 9676 - DNA, 21 bp, synthetic construct
  source 1..21: mol_type = other DNA
catcaggggggtactggtatg

SEQ ID NO: 9677 - DNA, 21 bp, synthetic construct
  source 1..21: mol_type = other DNA
cctcctgcggcgcaatcgggg

SEQ ID NO: 9678 - DNA, 21 bp, synthetic construct
  source 1..21: mol_type = other DNA
gacggggtcaacagaccttca

SEQ ID NO: 9679 - DNA, 21 bp, synthetic construct
  source 1..21: mol_type = other DNA
gctggtattacgtgtagtggt

SEQ ID NO: 9680 - DNA, 21 bp, synthetic construct
  source 1..21: mol_type = other DNA
tacatggacaaccgttccatg

SEQ ID NO: 9681 - DNA, 21 bp, synthetic construct
  source 1..21: mol_type = other DNA
actggagtctgtagccacgca

SEQ ID NO: 9682 - DNA, 21 bp, synthetic construct
  source 1..21: mol_type = other DNA
agaactgagaggaagggtccg

SEQ ID NO: 9683 - DNA, 21 bp, synthetic construct
  source 1..21: mol_type = other DNA
agctcggaaatcctggaaacg

SEQ ID NO: 9684 - DNA, 21 bp, synthetic construct
  source 1..21: mol_type = other DNA
ctggggattagttatgcgtcg

SEQ ID NO: 9685 - DNA, 21 bp, synthetic construct
  source 1..21: mol_type = other DNA
gctgacgaaataaacggggac

SEQ ID NO: 9686 - DNA, 21 bp, synthetic construct
  source 1..21: mol_type = other DNA
acgtctgcgtattctgagagg

SEQ ID NO: 9687 - DNA, 21 bp, synthetic construct
  source 1..21: mol_type = other DNA
aggattgaggtggatgttggt

SEQ ID NO: 9688 - DNA, 21 bp, synthetic construct
  source 1..21: mol_type = other DNA
atggctgatcgttttcagaag

SEQ ID NO: 9689 - DNA, 21 bp, synthetic construct
  source 1..21: mol_type = other DNA
ggatgggtcgaagttgaaagt

SEQ ID NO: 9690 - DNA, 21 bp, synthetic construct
  source 1..21: mol_type = other DNA
tctccgaatcgtcaggagcct

SEQ ID NO: 9691 - DNA, 21 bp, synthetic construct
  source 1..21: mol_type = other DNA
tttagttctgtggttatgacg

SEQ ID NO: 9692 - DNA, 21 bp, synthetic construct
  source 1..21: mol_type = other DNA
caaccactcggtgctctccca

SEQ ID NO: 9693 - DNA, 21 bp, synthetic construct
  source 1..21: mol_type = other DNA
caccaagacagcgttatccaa

SEQ ID NO: 9694 - DNA, 21 bp, synthetic construct
  source 1..21: mol_type = other DNA
cttcgtgtggattatttggaa

SEQ ID NO: 9695 - DNA, 21 bp, synthetic construct
  source 1..21: mol_type = other DNA
gctacacgaaagcacgaggga

SEQ ID NO: 9696 - DNA, 21 bp, synthetic construct
  source 1..21: mol_type = other DNA
tcgggtttgatggggaaggct

SEQ ID NO: 9697 - DNA, 21 bp, synthetic construct
  source 1..21: mol_type = other DNA
aaaaatggtacgttgctttct

SEQ ID NO: 9698 - DNA, 21 bp, synthetic construct
  source 1..21: mol_type = other DNA
cgtgattctgggaagagtacg

SEQ ID NO: 9699 - DNA, 21 bp, synthetic construct
  source 1..21: mol_type = other DNA
gtaaaaccatcgcactcagtg

SEQ ID NO: 9700 - DNA, 21 bp, synthetic construct
  source 1..21: mol_type = other DNA
tcgcgttctgttcctttgggt

SEQ ID NO: 9701 - DNA, 21 bp, synthetic construct
  source 1..21: mol_type = other DNA
tcggttaatgctgtgccgcgt

SEQ ID NO: 9702 - DNA, 21 bp, synthetic construct
  source 1..21: mol_type = other DNA
tttcatagtcagaagattgct

SEQ ID NO: 9703 - DNA, 21 bp, synthetic construct
  source 1..21: mol_type = other DNA
acgacgcagggtcctaagcat

SEQ ID NO: 9704 - DNA, 21 bp, synthetic construct
  source 1..21: mol_type = other DNA
acgctggaggggcataagctg

SEQ ID NO: 9705 - DNA, 21 bp, synthetic construct
  source 1..21: mol_type = other DNA
atctcaaacaacacacgactg

SEQ ID NO: 9706 - DNA, 21 bp, synthetic construct
  source 1..21: mol_type = other DNA
cgtgagcctactcttgagcag

SEQ ID NO: 9707 - DNA, 21 bp, synthetic construct
  source 1..21: mol_type = other DNA
gtggtttctaggaataatagt

SEQ ID NO: 9708 - DNA, 21 bp, synthetic construct
  source 1..21: mol_type = other DNA
ttgaatcttgtttcgacgcct

SEQ ID NO: 9709 - DNA, 21 bp, synthetic construct
  source 1..21: mol_type = other DNA
agatttcctagtgttgggtct

SEQ ID NO: 9710 - DNA, 21 bp, synthetic construct
  source 1..21: mol_type = other DNA
ccctcaactcacttccccgca

SEQ ID NO: 9711 - DNA, 21 bp, synthetic construct
  source 1..21: mol_type = other DNA
gacaaaatggtggtcattgcc

SEQ ID NO: 9712 - DNA, 21 bp, synthetic construct
  source 1..21: mol_type = other DNA
gacggggtccacagcccttca

SEQ ID NO: 9713 - DNA, 21 bp, synthetic construct
  source 1..21: mol_type = other DNA
tatgagggtccgattagtggg

SEQ ID NO: 9714 - DNA, 21 bp, synthetic construct
  source 1..21: mol_type = other DNA
tcgaccctcgaatcacggata

SEQ ID NO: 9715 - DNA, 21 bp, synthetic construct
  source 1..21: mol_type = other DNA
cgatgggtcgaagttcaaagt

SEQ ID NO: 9716 - DNA, 21 bp, synthetic construct
  source 1..21: mol_type = other DNA
gaggatggtaggattaatagt

SEQ ID NO: 9717 - DNA, 21 bp, synthetic construct
  source 1..21: mol_type = other DNA
gcttatgggacggatcagtcg

SEQ ID NO: 9718 - DNA, 21 bp, synthetic construct
  source 1..21: mol_type = other DNA
ggatgggtcgaacttcaaagt

SEQ ID NO: 9719 - DNA, 21 bp, synthetic construct
  source 1..21: mol_type = other DNA
gtgtcgaattcgtgtggtctt

SEQ ID NO: 9720 - DNA, 21 bp, synthetic construct
  source 1..21: mol_type = other DNA
aaaacgggtaatgttggtagt

SEQ ID NO: 9721 - DNA, 21 bp, synthetic construct
  source 1..21: mol_type = other DNA
actgtgagtggggtggggacg

SEQ ID NO: 9722 - DNA, 21 bp, synthetic construct
  source 1..21: mol_type = other DNA
agtactgagaggaagggtcag

SEQ ID NO: 9723 - DNA, 21 bp, synthetic construct
  source 1..21: mol_type = other DNA
atgatgcctaggagtgagatg

SEQ ID NO: 9724 - DNA, 21 bp, synthetic construct
  source 1..21: mol_type = other DNA
attatgtctcatggtcggagt

SEQ ID NO: 9725 - DNA, 21 bp, synthetic construct
  source 1..21: mol_type = other DNA
cccacatctcacttccccgca

SEQ ID NO: 9726 - DNA, 21 bp, synthetic construct
  source 1..21: mol_type = other DNA
gcggtagcaaacgtgccaaag

SEQ ID NO: 9727 - DNA, 21 bp, synthetic construct
  source 1..21: mol_type = other DNA
gctacacgaatgcacgtggca

SEQ ID NO: 9728 - DNA, 21 bp, synthetic construct
  source 1..21: mol_type = other DNA
tctgaacggggtagtagtgtg

SEQ ID NO: 9729 - DNA, 21 bp, synthetic construct
  source 1..21: mol_type = other DNA
tttcatagtgagatgattgct

SEQ ID NO: 9730 - DNA, 21 bp, synthetic construct
  source 1..21: mol_type = other DNA
accgcagaccgctacaaaatg

SEQ ID NO: 9731 - DNA, 21 bp, synthetic construct
  source 1..21: mol_type = other DNA
cgtccggtgctgggtgagaat

SEQ ID NO: 9732 - DNA, 21 bp, synthetic construct
  source 1..21: mol_type = other DNA
ctggtgattagttatgcggcg

SEQ ID NO: 9733 - DNA, 21 bp, synthetic construct
  source 1..21: mol_type = other DNA
gcggttaatactgtgccgcgt

SEQ ID NO: 9734 - DNA, 21 bp, synthetic construct
  source 1..21: mol_type = other DNA
gcggttattgctgtgccgcgt

SEQ ID NO: 9735 - DNA, 21 bp, synthetic construct
  source 1..21: mol_type = other DNA
gctctcgaaataaacggggac

SEQ ID NO: 9736 - DNA, 21 bp, synthetic construct
  source 1..21: mol_type = other DNA
gggagttcgattccgcagagg

SEQ ID NO: 9737 - DNA, 21 bp, synthetic construct
  source 1..21: mol_type = other DNA
tctgatcggtgtagtagtgtg

SEQ ID NO: 9738 - DNA, 21 bp, synthetic construct
  source 1..21: mol_type = other DNA
caaccagtcggtgatctccca

SEQ ID NO: 9739 - DNA, 21 bp, synthetic construct
  source 1..21: mol_type = other DNA
cctactatgcatggtgctggg

SEQ ID NO: 9740 - DNA, 21 bp, synthetic construct
  source 1..21: mol_type = other DNA
gcacttggcagaggtgctaca

SEQ ID NO: 9741 - DNA, 21 bp, synthetic construct
  source 1..21: mol_type = other DNA
ggtcctagacgtgctgtgggt

SEQ ID NO: 9742 - DNA, 21 bp, synthetic construct
  source 1..21: mol_type = other DNA
tatgcgggtccgattagaggg

SEQ ID NO: 9743 - DNA, 21 bp, synthetic construct
  source 1..21: mol_type = other DNA
tcgaccctcgtatcacggaaa

SEQ ID NO: 9744 - DNA, 21 bp, synthetic construct
  source 1..21: mol_type = other DNA
tccactgcagaacacggtggc

SEQ ID NO: 9745 - DNA, 21 bp, synthetic construct
  source 1..21: mol_type = other DNA
aatacgggtaaagttggtagt

SEQ ID NO: 9746 - DNA, 21 bp, synthetic construct
  source 1..21: mol_type = other DNA
ccggttaatgctgtgccgcgt

SEQ ID NO: 9747 - DNA, 21 bp, synthetic construct
  source 1..21: mol_type = other DNA
cgtgattctcggaagagttcg

SEQ ID NO: 9748 - DNA, 21 bp, synthetic construct
  source 1..21: mol_type = other DNA
gcggttaatgctgtgccgcat

SEQ ID NO: 9749 - DNA, 21 bp, synthetic construct
  source 1..21: mol_type = other DNA
gtgaagcgtttgcaggttccg

SEQ ID NO: 9750 - DNA, 21 bp, synthetic construct
  source 1..21: mol_type = other DNA
ttactagactcatggcctgac

SEQ ID NO: 9751 - DNA, 21 bp, synthetic construct
  source 1..21: mol_type = other DNA
ttgctttctgttcctttgggt

SEQ ID NO: 9752 - DNA, 21 bp, synthetic construct
  source 1..21: mol_type = other DNA
caaccagtctgtgctctccca

SEQ ID NO: 9753 - DNA, 21 bp, synthetic construct
  source 1..21: mol_type = other DNA
cgtagtaatgatagtcattag

SEQ ID NO: 9754 - DNA, 21 bp, synthetic construct
  source 1..21: mol_type = other DNA
gctaagatgcagtatggggat

SEQ ID NO: 9755 - DNA, 21 bp, synthetic construct
  source 1..21: mol_type = other DNA
gctggtattacgcgtagtggt

SEQ ID NO: 9756 - DNA, 21 bp, synthetic construct
  source 1..21: mol_type = other DNA
tcggtttagatggggaaggct

SEQ ID NO: 9757 - DNA, 21 bp, synthetic construct
  source 1..21: mol_type = other DNA
acggctccgtattctgagagg

SEQ ID NO: 9758 - DNA, 21 bp, synthetic construct
  source 1..21: mol_type = other DNA
acggttcctgcggaggttgcg

SEQ ID NO: 9759 - DNA, 21 bp, synthetic construct
  source 1..21: mol_type = other DNA
atggttcctggggaggttgcg

SEQ ID NO: 9760 - DNA, 21 bp, synthetic construct
  source 1..21: mol_type = other DNA
cagaaagggccgacgagtcgg

SEQ ID NO: 9761 - DNA, 21 bp, synthetic construct
  source 1..21: mol_type = other DNA
tttagttctctgggtatgacg

SEQ ID NO: 9762 - DNA, 21 bp, synthetic construct
  source 1..21: mol_type = other DNA
accaacaacttgcctctcccg

SEQ ID NO: 9763 - DNA, 21 bp, synthetic construct
  source 1..21: mol_type = other DNA
actggagtcggtagccaagca

SEQ ID NO: 9764 - DNA, 21 bp, synthetic construct
  source 1..21: mol_type = other DNA
agtagttatcctgctaattat

SEQ ID NO: 9765 - DNA, 21 bp, synthetic construct
  source 1..21: mol_type = other DNA
atgatgactaggagtgcgatg

SEQ ID NO: 9766 - DNA, 21 bp, synthetic construct
  source 1..21: mol_type = other DNA
cacctggagggcggtctcggg

SEQ ID NO: 9767 - DNA, 21 bp, synthetic construct
  source 1..21: mol_type = other DNA
cacctggcgcgcggtctcggg

SEQ ID NO: 9768 - DNA, 21 bp, synthetic construct
  source 1..21: mol_type = other DNA
ctggggattggttatgcggcg

SEQ ID NO: 9769 - DNA, 21 bp, synthetic construct
  source 1..21: mol_type = other DNA
ggataacaattccccagcgcc

SEQ ID NO: 9770 - DNA, 21 bp, synthetic construct
  source 1..21: mol_type = other DNA
atttatcagaatgctaagact

SEQ ID NO: 9771 - DNA, 21 bp, synthetic construct
  source 1..21: mol_type = other DNA
caaccagtcggtgctctccaa

SEQ ID NO: 9772 - DNA, 21 bp, synthetic construct
  source 1..21: mol_type = other DNA
gctacacaaatgcacgtggga

SEQ ID NO: 9773 - DNA, 21 bp, synthetic construct
  source 1..21: mol_type = other DNA
gctacacgaatgcacgcggga

SEQ ID NO: 9774 - DNA, 21 bp, synthetic construct
  source 1..21: mol_type = other DNA
atggctgatcgtattcagatg

SEQ ID NO: 9775 - DNA, 21 bp, synthetic construct
  source 1..21: mol_type = other DNA
ggatggctcgaagttcaaagt

SEQ ID NO: 9776 - DNA, 21 bp, synthetic construct
  source 1..21: mol_type = other DNA
ttcatggacactctattaacc

SEQ ID NO: 9777 - DNA, 21 bp, synthetic construct
  source 1..21: mol_type = other DNA
tttagttctgtgggtataacg

SEQ ID NO: 9778 - DNA, 21 bp, synthetic construct
  source 1..21: mol_type = other DNA
aataaaggtacgttgctttct

SEQ ID NO: 9779 - DNA, 21 bp, synthetic construct
  source 1..21: mol_type = other DNA
attatgtatcagggtcggagt

SEQ ID NO: 9780 - DNA, 21 bp, synthetic construct
  source 1..21: mol_type = other DNA
cgagacctgggtatggaaaac

SEQ ID NO: 9781 - DNA, 21 bp, synthetic construct
  source 1..21: mol_type = other DNA
cgtccgctgcagggtgagaat

SEQ ID NO: 9782 - DNA, 21 bp, synthetic construct
  source 1..21: mol_type = other DNA
ctggggtttagttatgcggcg

SEQ ID NO: 9783 - DNA, 21 bp, synthetic construct
  source 1..21: mol_type = other DNA
gaagtcgcactacacacgggc

SEQ ID NO: 9784 - DNA, 21 bp, synthetic construct
  source 1..21: mol_type = other DNA
tatgatcggggtagtagtgtg

SEQ ID NO: 9785 - DNA, 21 bp, synthetic construct
  source 1..21: mol_type = other DNA
aagtggagtggtgagtcggag

SEQ ID NO: 9786 - DNA, 21 bp, synthetic construct
  source 1..21: mol_type = other DNA
acgtctgctgctgctgttgct

SEQ ID NO: 9787 - DNA, 21 bp, synthetic construct
  source 1..21: mol_type = other DNA
actgcgggtctgactacggat

SEQ ID NO: 9788 - DNA, 21 bp, synthetic construct
  source 1..21: mol_type = other DNA
ataggatagacttacgtatca

SEQ ID NO: 9789 - DNA, 21 bp, synthetic construct
  source 1..21: mol_type = other DNA
gctcgtattacgggtagtggt

SEQ ID NO: 9790 - DNA, 21 bp, synthetic construct
  source 1..21: mol_type = other DNA
tacatggacacccgttccatc

SEQ ID NO: 9791 - DNA, 21 bp, synthetic construct
  source 1..21: mol_type = other DNA
acggctgcgtattctgagagt

SEQ ID NO: 9792 - DNA, 21 bp, synthetic construct
  source 1..21: mol_type = other DNA
gctgttactactcagactcgt

SEQ ID NO: 9793 - DNA, 21 bp, synthetic construct
  source 1..21: mol_type = other DNA
gtatgggtcgaagttcaaagt

SEQ ID NO: 9794 - DNA, 21 bp, synthetic construct
  source 1..21: mol_type = other DNA
cgtgattctgtgaagagttcg

SEQ ID NO: 9795 - DNA, 21 bp, synthetic construct
  source 1..21: mol_type = other DNA
tcttcggttcatgagattgcg

SEQ ID NO: 9796 - DNA, 21 bp, synthetic construct
  source 1..21: mol_type = other DNA
aaaggatcgacttacgtatca

SEQ ID NO: 9797 - DNA, 21 bp, synthetic construct
  source 1..21: mol_type = other DNA
actcgtgttgctgaaacggat

SEQ ID NO: 9798 - DNA, 21 bp, synthetic construct
  source 1..21: mol_type = other DNA
agtgtgacgattacttctggg

SEQ ID NO: 9799 - DNA, 21 bp, synthetic construct
  source 1..21: mol_type = other DNA
agtgtgacgattcctactggg

SEQ ID NO: 9800 - DNA, 21 bp, synthetic construct
  source 1..21: mol_type = other DNA
atcaccaacgctatagaatac

SEQ ID NO: 9801 - DNA, 21 bp, synthetic construct
  source 1..21: mol_type = other DNA
cgggatcgtatgaatcttcaa

SEQ ID NO: 9802 - DNA, 21 bp, synthetic construct
  source 1..21: mol_type = other DNA
ctaaaagaaacatgggaagca

SEQ ID NO: 9803 - DNA, 21 bp, synthetic construct
  source 1..21: mol_type = other DNA
gacaaaaaggtggtccttgcc

SEQ ID NO: 9804 - DNA, 21 bp, synthetic construct
  source 1..21: mol_type = other DNA
ctggggcaatccagtgaaggc

SEQ ID NO: 9805 - DNA, 21 bp, synthetic construct
  source 1..21: mol_type = other DNA
ttcatggacactctattatac

SEQ ID NO: 9806 - DNA, 21 bp, synthetic construct
  source 1..21: mol_type = other DNA
aatctgcagagtcagactctg

SEQ ID NO: 9807 - DNA, 21 bp, synthetic construct
  source 1..21: mol_type = other DNA
cgagtcatgggtatggaaaac

SEQ ID NO: 9808 - DNA, 21 bp, synthetic construct
  source 1..21: mol_type = other DNA
ctgcggattagttatgcggcg

SEQ ID NO: 9809 - DNA, 21 bp, synthetic construct
  source 1..21: mol_type = other DNA
gcggttaatgctgcgccgcgt

SEQ ID NO: 9810 - DNA, 21 bp, synthetic construct
  source 1..21: mol_type = other DNA
gtggatggtatgattaatagt

SEQ ID NO: 9811 - DNA, 21 bp, synthetic construct
  source 1..21: mol_type = other DNA
tccaacaacttgcctctccag

SEQ ID NO: 9812 - DNA, 21 bp, synthetic construct
  source 1..21: mol_type = other DNA
tccaagggcggtatcggctct

SEQ ID NO: 9813 - DNA, 21 bp, synthetic construct
  source 1..21: mol_type = other DNA
aggagtgaggtggctgttggt

SEQ ID NO: 9814 - DNA, 21 bp, synthetic construct
  source 1..21: mol_type = other DNA
cggggggtcgtgggtaactcg

SEQ ID NO: 9815 - DNA, 21 bp, synthetic construct
  source 1..21: mol_type = other DNA
gatcttgatgtggagcttctg

SEQ ID NO: 9816 - DNA, 21 bp, synthetic construct
  source 1..21: mol_type = other DNA
ggatgggtcgaagttcatagt

SEQ ID NO: 9817 - DNA, 21 bp, synthetic construct
  source 1..21: mol_type = other DNA
ttcatggacactctatcatcc

SEQ ID NO: 9818 - DNA, 21 bp, synthetic construct
  source 1..21: mol_type = other DNA
aacggcggcgtcggggtaatg

SEQ ID NO: 9819 - DNA, 21 bp, synthetic construct
  source 1..21: mol_type = other DNA
accggcggcctcggggtaatg

SEQ ID NO: 9820 - DNA, 21 bp, synthetic construct
  source 1..21: mol_type = other DNA
accggcggcgtcggggtaatt

SEQ ID NO: 9821 - DNA, 21 bp, synthetic construct
  source 1..21: mol_type = other DNA
atcaccaacgctatagaaatc

SEQ ID NO: 9822 - DNA, 21 bp, synthetic construct
  source 1..21: mol_type = other DNA
gctacacgagtgcacgtggga

SEQ ID NO: 9823 - DNA, 21 bp, synthetic construct
  source 1..21: mol_type = other DNA
gtcgtaaacaacacaacttgg

SEQ ID NO: 9824 - DNA, 21 bp, synthetic construct
  source 1..21: mol_type = other DNA
tagggggcgcagaatgctcgg

SEQ ID NO: 9825 - DNA, 21 bp, synthetic construct
  source 1..21: mol_type = other DNA
attgtgcagctggctcctgct

SEQ ID NO: 9826 - DNA, 21 bp, synthetic construct
  source 1..21: mol_type = other DNA
cgcctaggcttccttaccgcc

SEQ ID NO: 9827 - DNA, 21 bp, synthetic construct
  source 1..21: mol_type = other DNA
ctgtggattagttatgcggcg

SEQ ID NO: 9828 - DNA, 21 bp, synthetic construct
  source 1..21: mol_type = other DNA
gctcacgaaataaacgggcac

SEQ ID NO: 9829 - DNA, 21 bp, synthetic construct
  source 1..21: mol_type = other DNA
gctcgcgaaataaacggggac

SEQ ID NO: 9830 - DNA, 21 bp, synthetic construct
  source 1..21: mol_type = other DNA
gggagttcgaatccgctgagg

SEQ ID NO: 9831 - DNA, 21 bp, synthetic construct
  source 1..21: mol_type = other DNA
tcttcggatcatgtgattgcg

SEQ ID NO: 9832 - DNA, 21 bp, synthetic construct
  source 1..21: mol_type = other DNA
tttcaaagtgagaagattgct

SEQ ID NO: 9833 - DNA, 21 bp, synthetic construct
  source 1..21: mol_type = other DNA
acggttcgtggggaggttgcg

SEQ ID NO: 9834 - DNA, 21 bp, synthetic construct
  source 1..21: mol_type = other DNA
aggaatgaggtggctgttggt

SEQ ID NO: 9835 - DNA, 21 bp, synthetic construct
  source 1..21: mol_type = other DNA
atctcaaacaacaaacgagtg

SEQ ID NO: 9836 - DNA, 21 bp, synthetic construct
  source 1..21: mol_type = other DNA
cattctgaggatcgtggtact

SEQ ID NO: 9837 - DNA, 21 bp, synthetic construct
  source 1..21: mol_type = other DNA
gcatgggtcgaagttcaaagt

SEQ ID NO: 9838 - DNA, 21 bp, synthetic construct
  source 1..21: mol_type = other DNA
gggagggggatgggactgcgg

SEQ ID NO: 9839 - DNA, 21 bp, synthetic construct
  source 1..21: mol_type = other DNA
aataaggatgggggtttgaaa

SEQ ID NO: 9840 - DNA, 21 bp, synthetic construct
  source 1..21: mol_type = other DNA
caggagtctgattcgagtcct

SEQ ID NO: 9841 - DNA, 21 bp, synthetic construct
  source 1..21: mol_type = other DNA
catcgtgtggattatttggat

SEQ ID NO: 9842 - DNA, 21 bp, synthetic construct
  source 1..21: mol_type = other DNA
catctggggggtagtggtatg

SEQ ID NO: 9843 - DNA, 21 bp, synthetic construct
  source 1..21: mol_type = other DNA
ccctcatctaacttccccgca

SEQ ID NO: 9844 - DNA, 21 bp, synthetic construct
  source 1..21: mol_type = other DNA
cctacacgaatgcacgtggga

SEQ ID NO: 9845 - DNA, 21 bp, synthetic construct
  source 1..21: mol_type = other DNA
cttcgtgtggattaattggat

SEQ ID NO: 9846 - DNA, 21 bp, synthetic construct
  source 1..21: mol_type = other DNA
gacagccggtacatcagttcc

SEQ ID NO: 9847 - DNA, 21 bp, synthetic construct
  source 1..21: mol_type = other DNA
gagcggcagagtgataagggt

SEQ ID NO: 9848 - DNA, 21 bp, synthetic construct
  source 1..21: mol_type = other DNA
ggtaagatgcactatggggat

SEQ ID NO: 9849 - DNA, 21 bp, synthetic construct
  source 1..21: mol_type = other DNA
tatcatgagcgggatccgttg

SEQ ID NO: 9850 - DNA, 21 bp, synthetic construct
  source 1..21: mol_type = other DNA
ttgggggcgcagaaagctcgg

SEQ ID NO: 9851 - DNA, 21 bp, synthetic construct
  source 1..21: mol_type = other DNA
accgcagaccgcaaccaaatg

SEQ ID NO: 9852 - DNA, 21 bp, synthetic construct
  source 1..21: mol_type = other DNA
agagatgggcggctggcggtt

SEQ ID NO: 9853 - DNA, 21 bp, synthetic construct
  source 1..21: mol_type = other DNA
agcccccaacacacgcaagga

SEQ ID NO: 9854 - DNA, 21 bp, synthetic construct
  source 1..21: mol_type = other DNA
agctcggtaaacctggaaacg

SEQ ID NO: 9855 - DNA, 21 bp, synthetic construct
  source 1..21: mol_type = other DNA
atcggcggcaccccgcactct

SEQ ID NO: 9856 - DNA, 21 bp, synthetic construct
  source 1..21: mol_type = other DNA
cgtgatactgggaagagttcg

SEQ ID NO: 9857 - DNA, 21 bp, synthetic construct
  source 1..21: mol_type = other DNA
gcggttaatgctgtgccgtgt

SEQ ID NO: 9858 - DNA, 21 bp, synthetic construct
  source 1..21: mol_type = other DNA
gctcaccaaataaacggggac

SEQ ID NO: 9859 - DNA, 21 bp, synthetic construct
  source 1..21: mol_type = other DNA
gtgcagcgtttgaaggttccg

SEQ ID NO: 9860 - DNA, 21 bp, synthetic construct
  source 1..21: mol_type = other DNA
tccaacaacttgcctcacccg

SEQ ID NO: 9861 - DNA, 21 bp, synthetic construct
  source 1..21: mol_type = other DNA
tctcatcggggtagtagtgtg

SEQ ID NO: 9862 - DNA, 21 bp, synthetic construct
  source 1..21: mol_type = other DNA
tttcatagtgagaagatttct

SEQ ID NO: 9863 - DNA, 21 bp, synthetic construct
  source 1..21: mol_type = other DNA
acgacgcagcgtcctaagcct

SEQ ID NO: 9864 - DNA, 21 bp, synthetic construct
  source 1..21: mol_type = other DNA
acggctgcgtattctgagggg

SEQ ID NO: 9865 - DNA, 21 bp, synthetic construct
  source 1..21: mol_type = other DNA
acggttcctgtggaggttgcg

SEQ ID NO: 9866 - DNA, 21 bp, synthetic construct
  source 1..21: mol_type = other DNA
atctaaaacaacacacgagtg

SEQ ID NO: 9867 - DNA, 21 bp, synthetic construct
  source 1..21: mol_type = other DNA
cagaatgggccgccgagtcgg

SEQ ID NO: 9868 - DNA, 21 bp, synthetic construct
  source 1..21: mol_type = other DNA
cgggagctgaatatgatgacg

SEQ ID NO: 9869 - DNA, 21 bp, synthetic construct
  source 1..21: mol_type = other DNA
ctttttggttgggttgctgcg

SEQ ID NO: 9870 - DNA, 21 bp, synthetic construct
  source 1..21: mol_type = other DNA
gagggtcttgttcatacggtt

SEQ ID NO: 9871 - DNA, 21 bp, synthetic construct
  source 1..21: mol_type = other DNA
ggaggggtcgaagttcaaagt

SEQ ID NO: 9872 - DNA, 21 bp, synthetic construct
  source 1..21: mol_type = other DNA
tacatggacactctattatcc

SEQ ID NO: 9873 - DNA, 21 bp, synthetic construct
  source 1..21: mol_type = other DNA
ttgcatcttgttacgacgcct

SEQ ID NO: 9874 - DNA, 21 bp, synthetic construct
  source 1..21: mol_type = other DNA
ttgcatcttgtttcgccgcct

SEQ ID NO: 9875 - DNA, 21 bp, synthetic construct
  source 1..21: mol_type = other DNA
agtgagacgattccttctggg

SEQ ID NO: 9876 - DNA, 21 bp, synthetic construct
  source 1..21: mol_type = other DNA
ctaaaagaaacatcggtagca

SEQ ID NO: 9877 - DNA, 21 bp, synthetic construct
  source 1..21: mol_type = other DNA
gacagccggttcaacagttcc

SEQ ID NO: 9878 - DNA, 21 bp, synthetic construct
  source 1..21: mol_type = other DNA
ggacgaggcgacaacggagta

SEQ ID NO: 9879 - DNA, 21 bp, synthetic construct
  source 1..21: mol_type = other DNA
ggtcctagtcgtgatgtgggt

SEQ ID NO: 9880 - DNA, 21 bp, synthetic construct
  source 1..21: mol_type = other DNA
ggtgattacggagctatagcc

SEQ ID NO: 9881 - DNA, 21 bp, synthetic construct
  source 1..21: mol_type = other DNA
tacatggacaccccttccatg

SEQ ID NO: 9882 - DNA, 21 bp, synthetic construct
  source 1..21: mol_type = other DNA
tacatgtacacccgttccatg

SEQ ID NO: 9883 - DNA, 21 bp, synthetic construct
  source 1..21: mol_type = other DNA
cggcgtggggtttctaatctg

SEQ ID NO: 9884 - DNA, 21 bp, synthetic construct
  source 1..21: mol_type = other DNA
cgtccggtgcacggtgagaat

SEQ ID NO: 9885 - DNA, 21 bp, synthetic construct
  source 1..21: mol_type = other DNA
ctggggaatagttatgcggcg

SEQ ID NO: 9886 - DNA, 21 bp, synthetic construct
  source 1..21: mol_type = other DNA
gactcgaacggcataccgaca

SEQ ID NO: 9887 - DNA, 21 bp, synthetic construct
  source 1..21: mol_type = other DNA
gcgagttcgattccgctgagg

SEQ ID NO: 9888 - DNA, 21 bp, synthetic construct
  source 1..21: mol_type = other DNA
tcacacgccactgctgacata

SEQ ID NO: 9889 - DNA, 21 bp, synthetic construct
  source 1..21: mol_type = other DNA
acgacgcacggtcctaagcct

SEQ ID NO: 9890 - DNA, 21 bp, synthetic construct
  source 1..21: mol_type = other DNA
acgacgcagggtcctaagact

SEQ ID NO: 9891 - DNA, 21 bp, synthetic construct
  source 1..21: mol_type = other DNA
acgggatgagtacgaagctag

SEQ ID NO: 9892 - DNA, 21 bp, synthetic construct
  source 1..21: mol_type = other DNA
atctcaaaaaacacacgagtg

SEQ ID NO: 9893 - DNA, 21 bp, synthetic construct
  source 1..21: mol_type = other DNA
ctttttggtggggttgctgtg

SEQ ID NO: 9894 - DNA, 21 bp, synthetic construct
  source 1..21: mol_type = other DNA
tctcagaatcgtccggagcct

SEQ ID NO: 9895 - DNA, 21 bp, synthetic construct
  source 1..21: mol_type = other DNA
tttagttctgtgggtatgtcg

SEQ ID NO: 9896 - DNA, 21 bp, synthetic construct
  source 1..21: mol_type = other DNA
aattatcagaatgctatgact

SEQ ID NO: 9897 - DNA, 21 bp, synthetic construct
  source 1..21: mol_type = other DNA
atgggggcgcagaatgctcgg

SEQ ID NO: 9898 - DNA, 21 bp, synthetic construct
  source 1..21: mol_type = other DNA
caccaagccagcgttaaccaa

SEQ ID NO: 9899 - DNA, 21 bp, synthetic construct
  source 1..21: mol_type = other DNA
cccggaatgaaaaagtccata

SEQ ID NO: 9900 - DNA, 21 bp, synthetic construct
  source 1..21: mol_type = other DNA
cttagtgtggattatttggat

SEQ ID NO: 9901 - DNA, 21 bp, synthetic construct
  source 1..21: mol_type = other DNA
cttcgtgtggattattaggat

SEQ ID NO: 9902 - DNA, 21 bp, synthetic construct
  source 1..21: mol_type = other DNA
gctggtaatacgggtagtggt

SEQ ID NO: 9903 - DNA, 21 bp, synthetic construct
  source 1..21: mol_type = other DNA
tcgaccatcgtatcacggata

SEQ ID NO: 9904 - DNA, 21 bp, synthetic construct
  source 1..21: mol_type = other DNA
tcggttatgatggggaaggct

SEQ ID NO: 9905 - DNA, 21 bp, synthetic construct
  source 1..21: mol_type = other DNA
actggagtcgctagccacgca

SEQ ID NO: 9906 - DNA, 21 bp, synthetic construct
  source 1..21: mol_type = other DNA
agtaatggtcctgatcctggg

SEQ ID NO: 9907 - DNA, 21 bp, synthetic construct
  source 1..21: mol_type = other DNA
agtgattctgggaagagttcg

SEQ ID NO: 9908 - DNA, 21 bp, synthetic construct
  source 1..21: mol_type = other DNA
cgtacggtgcagggtgagaat

SEQ ID NO: 9909 - DNA, 21 bp, synthetic construct
  source 1..21: mol_type = other DNA
cgtccggtgcagggtgagatt

SEQ ID NO: 9910 - DNA, 21 bp, synthetic construct
  source 1..21: mol_type = other DNA
gtgcagagtttgcaggttccg

SEQ ID NO: 9911 - DNA, 21 bp, synthetic construct
  source 1..21: mol_type = other DNA
tcttcggttcaagtgattgcg

SEQ ID NO: 9912 - DNA, 21 bp, synthetic construct
  source 1..21: mol_type = other DNA
actctggtgtctaggactcgg

SEQ ID NO: 9913 - DNA, 21 bp, synthetic construct
  source 1..21: mol_type = other DNA
cggggggtcgtggttaactag

SEQ ID NO: 9914 - DNA, 21 bp, synthetic construct
  source 1..21: mol_type = other DNA
gcgggtcttgttaatacggtt

SEQ ID NO: 9915 - DNA, 21 bp, synthetic construct
  source 1..21: mol_type = other DNA
gggaggggggatgggactgag

SEQ ID NO: 9916 - DNA, 21 bp, synthetic construct
  source 1..21: mol_type = other DNA
gttcttgatgtggagcatctg

SEQ ID NO: 9917 - DNA, 21 bp, synthetic construct
  source 1..21: mol_type = other DNA
tttcagaatacgagtagagct

SEQ ID NO: 9918 - DNA, 21 bp, synthetic construct
  source 1..21: mol_type = other DNA
aaggggatggatatgggtact

SEQ ID NO: 9919 - DNA, 21 bp, synthetic construct
  source 1..21: mol_type = other DNA
aataaggatgggggtttgatt

SEQ ID NO: 9920 - DNA, 21 bp, synthetic construct
  source 1..21: mol_type = other DNA
aatatgttgtcgactgttact

SEQ ID NO: 9921 - DNA, 21 bp, synthetic construct
  source 1..21: mol_type = other DNA
acccgcggcgtcggggtaatg

SEQ ID NO: 9922 - DNA, 21 bp, synthetic construct
  source 1..21: mol_type = other DNA
acgacgaagcttcttgagatt

SEQ ID NO: 9923 - DNA, 21 bp, synthetic construct
  source 1..21: mol_type = other DNA
cactaagccagcgttatccaa

SEQ ID NO: 9924 - DNA, 21 bp, synthetic construct
  source 1..21: mol_type = other DNA
gagcggctgagtgagaagggt

SEQ ID NO: 9925 - DNA, 21 bp, synthetic construct
  source 1..21: mol_type = other DNA
gataatgcgaaggaggcttcg

SEQ ID NO: 9926 - DNA, 21 bp, synthetic construct
  source 1..21: mol_type = other DNA
gctacacgaatgcacgtggaa

SEQ ID NO: 9927 - DNA, 21 bp, synthetic construct
  source 1..21: mol_type = other DNA
gctggtattacgggtagtgtt

SEQ ID NO: 9928 - DNA, 21 bp, synthetic construct
  source 1..21: mol_type = other DNA
gggctgaataagaatgctact

SEQ ID NO: 9929 - DNA, 21 bp, synthetic construct
  source 1..21: mol_type = other DNA
ggtaagatgcagtattgggat

SEQ ID NO: 9930 - DNA, 21 bp, synthetic construct
  source 1..21: mol_type = other DNA
tatcatgagcgggttcagttg

SEQ ID NO: 9931 - DNA, 21 bp, synthetic construct
  source 1..21: mol_type = other DNA
tcggttttgatgtggaaggct

SEQ ID NO: 9932 - DNA, 21 bp, synthetic construct
  source 1..21: mol_type = other DNA
aataagggtaatgttggtagt

SEQ ID NO: 9933 - DNA, 21 bp, synthetic construct
  source 1..21: mol_type = other DNA
actggagtcggtagccacgaa

SEQ ID NO: 9934 - DNA, 21 bp, synthetic construct
  source 1..21: mol_type = other DNA
agctaggtaatcctggaaacg

SEQ ID NO: 9935 - DNA, 21 bp, synthetic construct
  source 1..21: mol_type = other DNA
atggggattagttatgcggcg

SEQ ID NO: 9936 - DNA, 21 bp, synthetic construct
  source 1..21: mol_type = other DNA
gctcactaaataaacggggac

SEQ ID NO: 9937 - DNA, 21 bp, synthetic construct
  source 1..21: mol_type = other DNA
tcttacaccacatagttcgcg

SEQ ID NO: 9938 - DNA, 21 bp, synthetic construct
  source 1..21: mol_type = other DNA
ttgcgttctgttgctttgggt

SEQ ID NO: 9939 - DNA, 21 bp, synthetic construct
  source 1..21: mol_type = other DNA
tttcgttctgttcctttgggt

SEQ ID NO: 9940 - DNA, 21 bp, synthetic construct
  source 1..21: mol_type = other DNA
actgggactactcagactgct

SEQ ID NO: 9941 - DNA, 21 bp, synthetic construct
  source 1..21: mol_type = other DNA
agaggggtccactccgtcctg

SEQ ID NO: 9942 - DNA, 21 bp, synthetic construct
  source 1..21: mol_type = other DNA
cgtgagcctactcatgagctg

SEQ ID NO: 9943 - DNA, 21 bp, synthetic construct
  source 1..21: mol_type = other DNA
ggatgggtcgaagttcaaact

SEQ ID NO: 9944 - DNA, 21 bp, synthetic construct
  source 1..21: mol_type = other DNA
ggtgggtcttcgcatgctatg

SEQ ID NO: 9945 - DNA, 21 bp, synthetic construct
  source 1..21: mol_type = other DNA
gtgtcggattcgggtggtctt

SEQ ID NO: 9946 - DNA, 21 bp, synthetic construct
  source 1..21: mol_type = other DNA
ttcatggacactcaattatcc

SEQ ID NO: 9947 - DNA, 21 bp, synthetic construct
  source 1..21: mol_type = other DNA
ttgcatcttgtttcgaagcct

SEQ ID NO: 9948 - DNA, 21 bp, synthetic construct
  source 1..21: mol_type = other DNA
accgccggcgtcggggtaatg

SEQ ID NO: 9949 - DNA, 21 bp, synthetic construct
  source 1..21: mol_type = other DNA
actgtgattggggaggggacg

SEQ ID NO: 9950 - DNA, 21 bp, synthetic construct
  source 1..21: mol_type = other DNA
caccaagccagccttatccaa

SEQ ID NO: 9951 - DNA, 21 bp, synthetic construct
  source 1..21: mol_type = other DNA
ccaactgtcgggcgggaaagt

SEQ ID NO: 9952 - DNA, 21 bp, synthetic construct
  source 1..21: mol_type = other DNA
ccttctatgcatcgtgctggg

SEQ ID NO: 9953 - DNA, 21 bp, synthetic construct
  source 1..21: mol_type = other DNA
cgtagtaatgatagacatttg

SEQ ID NO: 9954 - DNA, 21 bp, synthetic construct
  source 1..21: mol_type = other DNA
ctaaaagaaacatgggtagaa

SEQ ID NO: 9955 - DNA, 21 bp, synthetic construct
  source 1..21: mol_type = other DNA
gagcggctgagtgataagtgt

SEQ ID NO: 9956 - DNA, 21 bp, synthetic construct
  source 1..21: mol_type = other DNA
gcgattgctaatagtcatatt

SEQ ID NO: 9957 - DNA, 21 bp, synthetic construct
  source 1..21: mol_type = other DNA
acggttcctcgggaggttgcg

SEQ ID NO: 9958 - DNA, 21 bp, synthetic construct
  source 1..21: mol_type = other DNA
gacagccggttaatcagttcc

SEQ ID NO: 9959 - DNA, 21 bp, synthetic construct
  source 1..21: mol_type = other DNA
accgcagaccgctaccaaatc

SEQ ID NO: 9960 - DNA, 21 bp, synthetic construct
  source 1..21: mol_type = other DNA
gctcttactactcagcctcgt

SEQ ID NO: 9961 - DNA, 21 bp, synthetic construct
  source 1..21: mol_type = other DNA
ggattacaattccccagagcc

SEQ ID NO: 9962 - DNA, 21 bp, synthetic construct
  source 1..21: mol_type = other DNA
tccaacaactttcctctcccg

SEQ ID NO: 9963 - DNA, 21 bp, synthetic construct
  source 1..21: mol_type = other DNA
ttgcaacttgtttcgacgcct

SEQ ID NO: 9964 - DNA, 21 bp, synthetic construct
  source 1..21: mol_type = other DNA
cgtgaatctgggaagagttcg

SEQ ID NO: 9965 - DNA, 21 bp, synthetic construct
  source 1..21: mol_type = other DNA
acttttgatgctagtggtggt

SEQ ID NO: 9966 - DNA, 21 bp, synthetic construct
  source 1..21: mol_type = other DNA
ctttttggtagggttgctgcg

SEQ ID NO: 9967 - DNA, 21 bp, synthetic construct
  source 1..21: mol_type = other DNA
ttcatcgacactctattatcc

SEQ ID NO: 9968 - DNA, 21 bp, synthetic construct
  source 1..21: mol_type = other DNA
ctgtcgaattcgggtggtctt

SEQ ID NO: 9969 - DNA, 21 bp, synthetic construct
  source 1..21: mol_type = other DNA
gtcgtaaacaacacatcttgt

SEQ ID NO: 9970 - DNA, 21 bp, synthetic construct
  source 1..21: mol_type = other DNA
agtaatggtcctgctcctcgg

SEQ ID NO: 9971 - DNA, 21 bp, synthetic construct
  source 1..21: mol_type = other DNA
attatttctcagggtcggagt

SEQ ID NO: 9972 - DNA, 21 bp, synthetic construct
  source 1..21: mol_type = other DNA
cgagtcctgggtatggaaacg

SEQ ID NO: 9973 - DNA, 21 bp, synthetic construct
  source 1..21: mol_type = other DNA
gagagcggtgataatttgctt

SEQ ID NO: 9974 - DNA, 21 bp, synthetic construct
  source 1..21: mol_type = other DNA
accggcggcgtccgggtaatg

SEQ ID NO: 9975 - DNA, 21 bp, synthetic construct
  source 1..21: mol_type = other DNA
ctaaaagaaacatgtgtagca

SEQ ID NO: 9976 - DNA, 21 bp, synthetic construct
  source 1..21: mol_type = other DNA
tcggttttgattgggaaggct

SEQ ID NO: 9977 - DNA, 21 bp, synthetic construct
  source 1..21: mol_type = other DNA
actctggtgtctaggtctggg

SEQ ID NO: 9978 - DNA, 21 bp, synthetic construct
  source 1..21: mol_type = other DNA
ggataggtcgaagttcaaagt

SEQ ID NO: 9979 - DNA, 21 bp, synthetic construct
  source 1..21: mol_type = other DNA
accggcggcgtcgggctaatg

SEQ ID NO: 9980 - DNA, 21 bp, synthetic construct
  source 1..21: mol_type = other DNA
gtaaatccatcgccctcagtg

SEQ ID NO: 9981 - DNA, 21 bp, synthetic construct
  source 1..21: mol_type = other DNA
gagggtcgtgagtaaaaggat

SEQ ID NO: 9982 - DNA, 21 bp, synthetic construct
  source 1..21: mol_type = other DNA
cttcgtgtggaatatttggat

SEQ ID NO: 9983 - DNA, 21 bp, synthetic construct
  source 1..21: mol_type = other DNA
actgtgattggggtgggacgg

SEQ ID NO: 9984 - DNA, 21 bp, synthetic construct
  source 1..21: mol_type = other DNA
agctcgctaatcctggaaacg

SEQ ID NO: 9985 - DNA, 21 bp, synthetic construct
  source 1..21: mol_type = other DNA
tttcatagtgagaatattgct

SEQ ID NO: 9986 - DNA, 21 bp, synthetic construct
  source 1..21: mol_type = other DNA
tccactggagatcacggtggc

SEQ ID NO: 9987 - DNA, 21 bp, synthetic construct
  source 1..21: mol_type = other DNA
ggtaagatgcagtatcgggat

SEQ ID NO: 9988 - DNA, 21 bp, synthetic construct
  source 1..21: mol_type = other DNA
ggtaagattcagtatggggat

SEQ ID NO: 9989 - DNA, 21 bp, synthetic construct
  source 1..21: mol_type = other DNA
tctgatcggggtagtagtttg

SEQ ID NO: 9990 - DNA, 21 bp, synthetic construct
  source 1..21: mol_type = other DNA
ttactagactcatagcctgcc

SEQ ID NO: 9991 - DNA, 21 bp, synthetic construct
  source 1..21: mol_type = other DNA
actctgctgtctaggactggg

SEQ ID NO: 9992 - DNA, 21 bp, synthetic construct
  source 1..21: mol_type = other DNA
gggagttcgattccgctgagt

SEQ ID NO: 9993 - DNA, 21 bp, synthetic construct
  source 1..21: mol_type = other DNA
gcttatcggtcggatcagtcg

SEQ ID NO: 9994 - DNA, 21 bp, synthetic construct
  source 1..21: mol_type = other DNA
aaggggatggttattggtact

SEQ ID NO: 9995 - DNA, 21 bp, synthetic construct
  source 1..21: mol_type = other DNA
catctggggggtactggtatt

SEQ ID NO: 9996 - DNA, 21 bp, synthetic construct
  source 1..21: mol_type = other DNA
gacaaaatgctggtccttgcc

SEQ ID NO: 9997 - DNA, 21 bp, synthetic construct
  source 1..21: mol_type = other DNA
tctgtgattggggtggggacg

SEQ ID NO: 9998 - DNA, 21 bp, synthetic construct
  source 1..21: mol_type = other DNA
aataatggtacgtttctttct

SEQ ID NO: 9999 - DNA, 21 bp, synthetic construct
  source 1..21: mol_type = other DNA
actgtgattgggttggggacg

SEQ ID NO: 10000 - DNA, 21 bp, synthetic construct
  source 1..21: mol_type = other DNA
gcagtcaccgcgcaaccaagg

SEQ ID NO: 10001 - protein, 7 aa, synthetic construct
KRGDDSM

SEQ ID NO: 10002 - protein, 7 aa, synthetic construct
TRVADTV

SEQ ID NO: 10003 - protein, 7 aa, synthetic construct
VRGDYVS

SEQ ID NO: 10004 - protein, 7 aa, synthetic construct
GRGDHGV

SEQ ID NO: 10005 - protein, 7 aa, synthetic construct
VRGDMTT

SEQ ID NO: 10006 - protein, 7 aa, synthetic construct
TRAADTE

SEQ ID NO: 10007 - protein, 7 aa, synthetic construct
LRGDLGV

SEQ ID NO: 10008 - protein, 7 aa, synthetic construct
GRGDNMT

SEQ ID NO: 10009 - protein, 7 aa, synthetic construct
SRGDAAI

SEQ ID NO: 10010 - protein, 7 aa, synthetic construct
NRGDAII

SEQ ID NO: 10011 - protein, 7 aa, synthetic construct
TRVADTE

SEQ ID NO: 10012 - protein, 7 aa, synthetic construct
ERGDYRS

SEQ ID NO: 10013 - protein, 7 aa, synthetic construct
SRHTDTI

SEQ ID NO: 10014 - protein, 7 aa, synthetic construct
IRGDLPV

SEQ ID NO: 10015 - protein, 7 aa, synthetic construct
TRVADME

SEQ ID NO: 10016 - protein, 7 aa, synthetic construct
TRVADSE

SEQ ID NO: 10017 - protein, 7 aa, synthetic construct
LKREDVI

SEQ ID NO: 10018 - protein, 7 aa, synthetic construct
RRGDDDN

SEQ ID NO: 10019 - protein, 7 aa, synthetic construct
QRGDGGS

SEQ ID NO: 10020 - protein, 7 aa, synthetic construct
ARGDNRT

SEQ ID NO: 10021 - protein, 7 aa, synthetic construct
GRGDENI

SEQ ID NO: 10022 - protein, 7 aa, synthetic construct
SRGDGKA

SEQ ID NO: 10023 - protein, 7 aa, synthetic construct
GRGGDRV

SEQ ID NO: 10024 - protein, 7 aa, synthetic construct
ERGDMGR

SEQ ID NO: 10025 - protein, 7 aa, synthetic construct
PRGDVVG

SEQ ID NO: 10026 - protein, 7 aa, synthetic construct
DGRRDSV

SEQ ID NO: 10027 - protein, 7 aa, synthetic construct
NERGFSG

SEQ ID NO: 10028 - protein, 7 aa, synthetic construct
ARGDGGH

SEQ ID NO: 10029 - protein, 7 aa, synthetic construct
GRGDGTA

SEQ ID NO: 10030 - protein, 7 aa, synthetic construct
ERGDNNP

SEQ ID NO: 10031 - protein, 7 aa, synthetic construct
VRGDVGS

SEQ ID NO: 10032 - protein, 7 aa, synthetic construct
LRSADMT

SEQ ID NO: 10033 - protein, 7 aa, synthetic construct
GRGDAAL

SEQ ID NO: 10034 - protein, 7 aa, synthetic construct
RERADGH

SEQ ID NO: 10035 - protein, 7 aa, synthetic construct
PKGDDGA

SEQ ID NO: 10036 - protein, 7 aa, synthetic construct
LRGDGSP

SEQ ID NO: 10037 - protein, 7 aa, synthetic construct
RGDLGSH

SEQ ID NO: 10038 - protein, 7 aa, synthetic construct
QRGDSTL

SEQ ID NO: 10039 - protein, 7 aa, synthetic construct
ERGDNNH

SEQ ID NO: 10040 - protein, 7 aa, synthetic construct
GRGDVTS

SEQ ID NO: 10041 - protein, 7 aa, synthetic construct
RGDVDTS

SEQ ID NO: 10042 - protein, 7 aa, synthetic construct
GRGDNLT

SEQ ID NO: 10043 - protein, 7 aa, synthetic construct
SMPRTSD

SEQ ID NO: 10044 - protein, 7 aa, synthetic construct
TRGDDHS

SEQ ID NO: 10045 - protein, 7 aa, synthetic construct
VMPRTVM

SEQ ID NO: 10046 - protein, 7 aa, synthetic construct
MMPRSAM

SEQ ID NO: 10047 - protein, 7 aa, synthetic construct
LRGDNHG

SEQ ID NO: 10048 - protein, 7 aa, synthetic construct
RGDSVGP

SEQ ID NO: 10049 - protein, 7 aa, synthetic construct
TRGDGEC

SEQ ID NO: 10050 - protein, 7 aa, synthetic construct
LRGDLSP

SEQ ID NO: 10051 - protein, 7 aa, synthetic construct
VRGDYGA

SEQ ID NO: 10052 - protein, 7 aa, synthetic construct
MRGDNGL

SEQ ID NO: 10053 - protein, 7 aa, synthetic construct
SLGSNAS

SEQ ID NO: 10054 - protein, 7 aa, synthetic construct
LRSDSVR

SEQ ID NO: 10055 - protein, 7 aa, synthetic construct
VNDRAVH

SEQ ID NO: 10056 - protein, 7 aa, synthetic construct
AIANSPI

SEQ ID NO: 10057 - protein, 7 aa, synthetic construct
DGRRDTV

SEQ ID NO: 10058 - protein, 7 aa, synthetic construct
PARGDAI

SEQ ID NO: 10059 - protein, 7 aa, synthetic construct
VRGDVIT

SEQ ID NO: 10060 - protein, 7 aa, synthetic construct
VGASGAS

SEQ ID NO: 10061 - protein, 7 aa, synthetic construct
VAREMGS

SEQ ID NO: 10062 - protein, 7 aa, synthetic construct
LHEKQVR

SEQ ID NO: 10063 - protein, 7 aa, synthetic construct
LGSRVQS

SEQ ID NO: 10064 - protein, 7 aa, synthetic construct
GGHGMST

SEQ ID NO: 10065 - protein, 7 aa, synthetic construct
SDGLQRA

SEQ ID NO: 10066 - protein, 7 aa, synthetic construct
VGAVRTP

SEQ ID NO: 10067 - protein, 7 aa, synthetic construct
LSSRLIA

SEQ ID NO: 10068 - protein, 7 aa, synthetic construct
DRAGGTE

SEQ ID NO: 10069 - protein, 7 aa, synthetic construct
WPGSNAS

SEQ ID NO: 10070 - protein, 7 aa, synthetic construct
AKSDLGV

SEQ ID NO: 10071 - protein, 7 aa, synthetic construct
SNTQAPM

SEQ ID NO: 10072 - protein, 7 aa, synthetic construct
TVEIVRG

SEQ ID NO: 10073 - protein, 7 aa, synthetic construct
VRGGDGV

SEQ ID NO: 10074 - protein, 7 aa, synthetic construct
SSSVNDR

SEQ ID NO: 10075 - protein, 7 aa, synthetic construct
IGSVTHS

SEQ ID NO: 10076 - protein, 7 aa, synthetic construct
GRATDYT

SEQ ID NO: 10077 - protein, 7 aa, synthetic construct
TRGDNAD

SEQ ID NO: 10078 - protein, 7 aa, synthetic construct
VRGDDSI

SEQ ID NO: 10079 - protein, 7 aa, synthetic construct
ELRTSER

SEQ ID NO: 10080 - protein, 7 aa, synthetic construct
KQEYSTA

SEQ ID NO: 10081 - protein, 7 aa, synthetic construct
RSNDSHL

SEQ ID NO: 10082 - protein, 7 aa, synthetic construct
QLKGNAD

SEQ ID NO: 10083 - protein, 7 aa, synthetic construct
GSRSETN

SEQ ID NO: 10084 - protein, 7 aa, synthetic construct
SNNLPLP

SEQ ID NO: 10085 - protein, 7 aa, synthetic construct
LRGDLKA

SEQ ID NO: 10086 - protein, 7 aa, synthetic construct
EGRFLDA

SEQ ID NO: 10087 - protein, 7 aa, synthetic construct
RVTTALA

SEQ ID NO: 10088 - protein, 7 aa, synthetic construct
SDGRLAV

SEQ ID NO: 10089 - protein, 7 aa, synthetic construct
AIANSSI

SEQ ID NO: 10090 - protein, 7 aa, synthetic construct
RHNGNDG

SEQ ID NO: 10091 - protein, 7 aa, synthetic construct
SRVADTE

SEQ ID NO: 10092 - protein, 7 aa, synthetic construct
MRSAEMM

SEQ ID NO: 10093 - protein, 7 aa, synthetic construct
ERGDNNT

SEQ ID NO: 10094 - protein, 7 aa, synthetic construct
GRASDNT

SEQ ID NO: 10095 - protein, 7 aa, synthetic construct
TSLSSVA

SEQ ID NO: 10096 - protein, 7 aa, synthetic construct
IGGVMSL

SEQ ID NO: 10097 - protein, 7 aa, synthetic construct
QAETRGV

SEQ ID NO: 10098 - protein, 7 aa, synthetic construct
FVIQQSG

SEQ ID NO: 10099 - protein, 7 aa, synthetic construct
TGTSLVI

SEQ ID NO: 10100 - protein, 7 aa, synthetic construct
FTGVGVV

SEQ ID NO: 10101 - protein, 7 aa, synthetic construct
MTTGVSA

SEQ ID NO: 10102 - protein, 7 aa, synthetic construct
LKGDTSS

SEQ ID NO: 10103 - protein, 7 aa, synthetic construct
GRQDTTT

SEQ ID NO: 10104 - protein, 7 aa, synthetic construct
YSVGPGS

SEQ ID NO: 10105 - protein, 7 aa, synthetic construct
SGGTMST

SEQ ID NO: 10106 - protein, 7 aa, synthetic construct
AVTTQPR

SEQ ID NO: 10107 - protein, 7 aa, synthetic construct
RVLGMDN

SEQ ID NO: 10108 - protein, 7 aa, synthetic construct
RGDSPAA

SEQ ID NO: 10109 - protein, 7 aa, synthetic construct
PSSHHPA

SEQ ID NO: 10110 - protein, 7 aa, synthetic construct
RERLDTT

SEQ ID NO: 10111 - protein, 7 aa, synthetic construct
HGALSNV

SEQ ID NO: 10112 - protein, 7 aa, synthetic construct
EYPRGPS

SEQ ID NO: 10113 - protein, 7 aa, synthetic construct
VRGDENW

SEQ ID NO: 10114 - protein, 7 aa, synthetic construct
RGDSGSF

SEQ ID NO: 10115 - protein, 7 aa, synthetic construct
TGSAVMI

SEQ ID NO: 10116 - protein, 7 aa, synthetic construct
VSNSGGL

SEQ ID NO: 10117 - protein, 7 aa, synthetic construct
SSHVGGL

SEQ ID NO: 10118 - protein, 7 aa, synthetic construct
VGHGGDR

SEQ ID NO: 10119 - protein, 7 aa, synthetic construct
AVNAVTG

SEQ ID NO: 10120 - protein, 7 aa, synthetic construct
YRGDGEI

SEQ ID NO: 10121 - protein, 7 aa, synthetic construct
GVTSQPL

SEQ ID NO: 10122 - protein, 7 aa, synthetic construct
NLQSLTL

SEQ ID NO: 10123 - protein, 7 aa, synthetic construct
YSPLHPQ

SEQ ID NO: 10124 - protein, 7 aa, synthetic construct
YVRTVDL

SEQ ID NO: 10125 - protein, 7 aa, synthetic construct
LDSGKST

SEQ ID NO: 10126 - protein, 7 aa, synthetic construct
GVKTSEL

SEQ ID NO: 10127 - protein, 7 aa, synthetic construct
IGGVKSL

SEQ ID NO: 10128 - protein, 7 aa, synthetic construct
QETGKLL

SEQ ID NO: 10129 - protein, 7 aa, synthetic construct
ANQYPTG

SEQ ID NO: 10130 - protein, 7 aa, synthetic construct
DRVSVIA

SEQ ID NO: 10131 - protein, 7 aa, synthetic construct
HGSPGAY

SEQ ID NO: 10132 - protein, 7 aa, synthetic construct
DRGDSAT

SEQ ID NO: 10133 - protein, 7 aa, synthetic construct
IALSVNS

SEQ ID NO: 10134 - protein, 7 aa, synthetic construct
TRVADTG

SEQ ID NO: 10135 - protein, 7 aa, synthetic construct
DTTRLVG

SEQ ID NO: 10136 - protein, 7 aa, synthetic construct
GVIKSIS

SEQ ID NO: 10137 - protein, 7 aa, synthetic construct
VAVLRGG

SEQ ID NO: 10138 - protein, 7 aa, synthetic construct
GKTGVPF

SEQ ID NO: 10139 - protein, 7 aa, synthetic construct
FAAGGVL

SEQ ID NO: 10140 - protein, 7 aa, synthetic construct
SMVSQRM

SEQ ID NO: 10141 - protein, 7 aa, synthetic construct
LRPSADV

SEQ ID NO: 10142 - protein, 7 aa, synthetic construct
ISDRAAV

SEQ ID NO: 10143 - protein, 7 aa, synthetic construct
SEIGRIT

SEQ ID NO: 10144 - protein, 7 aa, synthetic construct
HSGGMVV

SEQ ID NO: 10145 - protein, 7 aa, synthetic construct
FVSNAGV

SEQ ID NO: 10146 - protein, 7 aa, synthetic construct
VIGSGTA

SEQ ID NO: 10147 - protein, 7 aa, synthetic construct
GERYNDT

SEQ ID NO: 10148 - protein, 7 aa, synthetic construct
LPRGGVL

SEQ ID NO: 10149 - protein, 7 aa, synthetic construct
GSREGFR

SEQ ID NO: 10150 - protein, 7 aa, synthetic construct
SGARDSM

SEQ ID NO: 10151 - protein, 7 aa, synthetic construct
RSVGPTS

SEQ ID NO: 10152 - protein, 7 aa, synthetic construct
QRQADLV

SEQ ID NO: 10153 - protein, 7 aa, synthetic construct
VRTDGPR

SEQ ID NO: 10154 - protein, 7 aa, synthetic construct
APMSTNR

SEQ ID NO: 10155 - protein, 7 aa, synthetic construct
TPGRSGN

SEQ ID NO: 10156 - protein, 7 aa, synthetic construct
RVLGMEN

SEQ ID NO: 10157 - protein, 7 aa, synthetic construct
SPKDKDA

SEQ ID NO: 10158 - protein, 7 aa, synthetic construct
VALAVRG

SEQ ID NO: 10159 - protein, 7 aa, synthetic construct
MRGSNFS

SEQ ID NO: 10160 - protein, 7 aa, synthetic construct
SGGTSFS

SEQ ID NO: 10161 - protein, 7 aa, synthetic construct
VVNNTSW

SEQ ID NO: 10162 - protein, 7 aa, synthetic construct
SATRMPS

SEQ ID NO: 10163 - protein, 7 aa, synthetic construct
FQVVGPS

SEQ ID NO: 10164 - protein, 7 aa, synthetic construct
RDQAVVG

SEQ ID NO: 10165 - protein, 7 aa, synthetic construct
ASGTGGY

SEQ ID NO: 10166 - protein, 7 aa, synthetic construct
KFNDGGG

SEQ ID NO: 10167 - protein, 7 aa, synthetic construct
LLDVSQR

SEQ ID NO: 10168 - protein, 7 aa, synthetic construct
GVGLSML

SEQ ID NO: 10169 - protein, 7 aa, synthetic construct
GAGVGLS

SEQ ID NO: 10170 - protein, 7 aa, synthetic construct
HPTHGLV

SEQ ID NO: 10171 - protein, 7 aa, synthetic construct
HSGLSSS

SEQ ID NO: 10172 - protein, 7 aa, synthetic construct
YLDITAV

SEQ ID NO: 10173 - protein, 7 aa, synthetic construct
DRASISA

SEQ ID NO: 10174 - protein, 7 aa, synthetic construct
MMNGAGR

SEQ ID NO: 10175 - protein, 7 aa, synthetic construct
GRATDNT

SEQ ID NO: 10176 - protein, 7 aa, synthetic construct
EARGDDD

SEQ ID NO: 10177 - protein, 7 aa, synthetic construct
AVNAVPR

SEQ ID NO: 10178 - protein, 7 aa, synthetic construct
VGALYNS

SEQ ID NO: 10179 - protein, 7 aa, synthetic construct
IGTSGAV

SEQ ID NO: 10180 - protein, 7 aa, synthetic construct
AKGSLFE

SEQ ID NO: 10181 - protein, 7 aa, synthetic construct
TQSALNV

SEQ ID NO: 10182 - protein, 7 aa, synthetic construct
SMAESRP

SEQ ID NO: 10183 - protein, 7 aa, synthetic construct
GRFSSDN

SEQ ID NO: 10184 - protein, 7 aa, synthetic construct
AILSVSG

SEQ ID NO: 10185 - protein, 7 aa, synthetic construct
YMDTRSM

SEQ ID NO: 10186 - protein, 7 aa, synthetic construct
SHAVGTV

SEQ ID NO: 10187 - protein, 7 aa, synthetic construct
LMNERAG

SEQ ID NO: 10188 - protein, 7 aa, synthetic construct
VTGNSTY

SEQ ID NO: 10189 - protein, 7 aa, synthetic construct
DRRADAA

SEQ ID NO: 10190 - protein, 7 aa, synthetic construct
QGKTHAP

SEQ ID NO: 10191 - protein, 7 aa, synthetic construct
GSREGLS

SEQ ID NO: 10192 - protein, 7 aa, synthetic construct
VLGLANS

SEQ ID NO: 10193 - protein, 7 aa, synthetic construct
TKVADIS

SEQ ID NO: 10194 - protein, 7 aa, synthetic construct
ARGDTLC

SEQ ID NO: 10195 - protein, 7 aa, synthetic construct
VPELARN

SEQ ID NO: 10196 - protein, 7 aa, synthetic construct
STAGMTI

SEQ ID NO: 10197 - protein, 7 aa, synthetic construct
MGTKFLD

SEQ ID NO: 10198 - protein, 7 aa, synthetic construct
TADRYQM

SEQ ID NO: 10199 - protein, 7 aa, synthetic construct
RVAGSEE

SEQ ID NO: 10200 - protein, 7 aa, synthetic construct
VSVGLAP

SEQ ID NO: 10201 - protein, 7 aa, synthetic construct
KGGYTSS

SEQ ID NO: 10202 - protein, 7 aa, synthetic construct
VGREMGS

SEQ ID NO: 10203 - protein, 7 aa, synthetic construct
YDGVARY

SEQ ID NO: 10204 - protein, 7 aa, synthetic construct
VVGSGLL

SEQ ID NO: 10205 - protein, 7 aa, synthetic construct
LARGEGA

SEQ ID NO: 10206 - protein, 7 aa, synthetic construct
SGTSHID

SEQ ID NO: 10207 - protein, 7 aa, synthetic construct
AVREERT

SEQ ID NO: 10208 - protein, 7 aa, synthetic construct
FMDTLLS

SEQ ID NO: 10209 - protein, 7 aa, synthetic construct
FGTPANA

SEQ ID NO: 10210 - protein, 7 aa, synthetic construct
QAESRGV

SEQ ID NO: 10211 - protein, 7 aa, synthetic construct
DGQPRLS

SEQ ID NO: 10212 - protein, 7 aa, synthetic construct
MGDPRTL

SEQ ID NO: 10213 - protein, 7 aa, synthetic construct
GTSNANT

SEQ ID NO: 10214 - protein, 7 aa, synthetic construct
TGRVGVT

SEQ ID NO: 10215 - protein, 7 aa, synthetic construct
GRADAIQ

SEQ ID NO: 10216 - protein, 7 aa, synthetic construct
FQNTSSA

SEQ ID NO: 10217 - protein, 7 aa, synthetic construct
LRGDVAG

SEQ ID NO: 10218 - protein, 7 aa, synthetic construct
VNAKEAS

SEQ ID NO: 10219 - protein, 7 aa, synthetic construct
WGLSTTS

SEQ ID NO: 10220 - protein, 7 aa, synthetic construct
VNASNEF

SEQ ID NO: 10221 - protein, 7 aa, synthetic construct
DFRGERP

SEQ ID NO: 10222 - protein, 7 aa, synthetic construct
REQTGLS

SEQ ID NO: 10223 - protein, 7 aa, synthetic construct
VGTKFLD

SEQ ID NO: 10224 - protein, 7 aa, synthetic construct
NNGTLLS

SEQ ID NO: 10225 - protein, 7 aa, synthetic construct
RPVQGEN

SEQ ID NO: 10226 - protein, 7 aa, synthetic construct
ERGDNLL

SEQ ID NO: 10227 - protein, 7 aa, synthetic construct
TLGSAHQ

SEQ ID NO: 10228 - protein, 7 aa, synthetic construct
SSVATGA

SEQ ID NO: 10229 - protein, 7 aa, synthetic construct
VYVTTTA

SEQ ID NO: 10230 - protein, 7 aa, synthetic construct
SGKDRND

SEQ ID NO: 10231 - protein, 7 aa, synthetic construct
SNPSRTP

SEQ ID NO: 10232 - protein, 7 aa, synthetic construct
LSRVTAV

SEQ ID NO: 10233 - protein, 7 aa, synthetic construct
LGSAMLN

SEQ ID NO: 10234 - protein, 7 aa, synthetic construct
LRSAEMM

SEQ ID NO: 10235 - protein, 7 aa, synthetic construct
DVTSQPR

SEQ ID NO: 10236 - protein, 7 aa, synthetic construct
RGSVVLA

SEQ ID NO: 10237 - protein, 7 aa, synthetic construct
AGTTQSQ

SEQ ID NO: 10238 - protein, 7 aa, synthetic construct
QRTEAYT

SEQ ID NO: 10239 - protein, 7 aa, synthetic construct
ANANSTS

SEQ ID NO: 10240 - protein, 7 aa, synthetic construct
AGHYGSS

SEQ ID NO: 10241 - protein, 7 aa, synthetic construct
NRADSSY

SEQ ID NO: 10242 - protein, 7 aa, synthetic construct
WGSGSVA

SEQ ID NO: 10243 - protein, 7 aa, synthetic construct
EPIGGRV

SEQ ID NO: 10244 - protein, 7 aa, synthetic construct
VLSVANS

SEQ ID NO: 10245 - protein, 7 aa, synthetic construct
AGNKQSQ

SEQ ID NO: 10246 - protein, 7 aa, synthetic construct
IGHEAGM

SEQ ID NO: 10247 - protein, 7 aa, synthetic construct
WATAGTG

SEQ ID NO: 10248 - protein, 7 aa, synthetic construct
VLGLSPK

SEQ ID NO: 10249 - protein, 7 aa, synthetic construct
REGTASP

SEQ ID NO: 10250 - protein, 7 aa, synthetic construct
STTASAV

SEQ ID NO: 10251 - protein, 7 aa, synthetic construct
RKNDLDL

SEQ ID NO: 10252 - protein, 7 aa, synthetic construct
VSGSQYA

SEQ ID NO: 10253 - protein, 7 aa, synthetic construct
SATKLPN

SEQ ID NO: 10254 - protein, 7 aa, synthetic construct
TMSFTVA

SEQ ID NO: 10255 - protein, 7 aa, synthetic construct
LPESRSM

SEQ ID NO: 10256 - protein, 7 aa, synthetic construct
RAIGPQA

SEQ ID NO: 10257 - protein, 7 aa, synthetic construct
VSGGIAY

SEQ ID NO: 10258 - protein, 7 aa, synthetic construct
AMASQYA

SEQ ID NO: 10259 - protein, 7 aa, synthetic construct
VTGQAGR

SEQ ID NO: 10260 - protein, 7 aa, synthetic construct
NPGVVLA

SEQ ID NO: 10261 - protein, 7 aa, synthetic construct
LHMGNLA

SEQ ID NO: 10262 - protein, 7 aa, synthetic construct
DSRFISS

SEQ ID NO: 10263 - protein, 7 aa, synthetic construct
FRGDHHS

SEQ ID NO: 10264 - protein, 7 aa, synthetic construct
LSLGSKS

SEQ ID NO: 10265 - protein, 7 aa, synthetic construct
RGDLGLT

SEQ ID NO: 10266 - protein, 7 aa, synthetic construct
DKPNSSS

SEQ ID NO: 10267 - protein, 7 aa, synthetic construct
LDSGKSL

SEQ ID NO: 10268 - protein, 7 aa, synthetic construct
EFARRGP

SEQ ID NO: 10269 - protein, 7 aa, synthetic construct
VSVGSSG

SEQ ID NO: 10270 - protein, 7 aa, synthetic construct
TVNSTGS

SEQ ID NO: 10271 - protein, 7 aa, synthetic construct
GTISTSN

SEQ ID NO: 10272 - protein, 7 aa, synthetic construct
PRGNDSN

SEQ ID NO: 10273 - protein, 7 aa, synthetic construct
VSGTTTF

SEQ ID NO: 10274 - protein, 7 aa, synthetic construct
GGSLTLN

SEQ ID NO: 10275 - protein, 7 aa, synthetic construct
GSVQRSL

SEQ ID NO: 10276 - protein, 7 aa, synthetic construct
SGGNYGV

SEQ ID NO: 10277 - protein, 7 aa, synthetic construct
TNNQAHA

SEQ ID NO: 10278 - protein, 7 aa, synthetic construct
SRHGDMT

SEQ ID NO: 10279 - protein, 7 aa, synthetic construct
LPTMDRG

SEQ ID NO: 10280 - protein, 7 aa, synthetic construct
SVTIPSG

SEQ ID NO: 10281 - protein, 7 aa, synthetic construct
GRTDSVA

SEQ ID NO: 10282 - protein, 7 aa, synthetic construct
VTKSETM

SEQ ID NO: 10283 - protein, 7 aa, synthetic construct
PNGQSPR

SEQ ID NO: 10284 - protein, 7 aa, synthetic construct
RAVQVSA

SEQ ID NO: 10285 - protein, 7 aa, synthetic construct
LFNGMSS

SEQ ID NO: 10286 - protein, 7 aa, synthetic construct
GGLRQVL

SEQ ID NO: 10287 - protein, 7 aa, synthetic construct
DRHRESI

SEQ ID NO: 10288 - protein, 7 aa, synthetic construct
NKDGGLN

SEQ ID NO: 10289 - protein, 7 aa, synthetic construct
TGTGTRD

SEQ ID NO: 10290 - protein, 7 aa, synthetic construct
GGTSIGN

SEQ ID NO: 10291 - protein, 7 aa, synthetic construct
KLNEIRL

SEQ ID NO: 10292 - protein, 7 aa, synthetic construct
RAVQVSV

SEQ ID NO: 10293 - protein, 7 aa, synthetic construct
MGGALGN

SEQ ID NO: 10294 - protein, 7 aa, synthetic construct
IRGDGEQ

SEQ ID NO: 10295 - protein, 7 aa, synthetic construct
NVASSQL

SEQ ID NO: 10296 - protein, 7 aa, synthetic construct
VGSGVGL

SEQ ID NO: 10297 - protein, 7 aa, synthetic construct
LQRGEGA

SEQ ID NO: 10298 - protein, 7 aa, synthetic construct
MASDMSR

SEQ ID NO: 10299 - protein, 7 aa, synthetic construct
TLPNTAA

SEQ ID NO: 10300 - protein, 7 aa, synthetic construct
QSNVVVG

SEQ ID NO: 10301 - protein, 7 aa, synthetic construct
MFSAASK

SEQ ID NO: 10302 - protein, 7 aa, synthetic construct
NMLSTVP

SEQ ID NO: 10303 - protein, 7 aa, synthetic construct
VSAVQAR

SEQ ID NO: 10304 - protein, 7 aa, synthetic construct
HIAQTAS

SEQ ID NO: 10305 - protein, 7 aa, synthetic construct
FDAKAPT

SEQ ID NO: 10306 - protein, 7 aa, synthetic construct
LGQSNLA

SEQ ID NO: 10307 - protein, 7 aa, synthetic construct
SARNTLV

SEQ ID NO: 10308 - protein, 7 aa, synthetic construct
LKSTFIG

SEQ ID NO: 10309 - protein, 7 aa, synthetic construct
ADRMTTD

SEQ ID NO: 10310 - protein, 7 aa, synthetic construct
FMDTGSM

SEQ ID NO: 10311 - protein, 7 aa, synthetic construct
HGVGGPP

SEQ ID NO: 10312 - protein, 7 aa, synthetic construct
GHYGAMA

SEQ ID NO: 10313 - protein, 7 aa, synthetic construct
LGTQSDR

SEQ ID NO: 10314 - protein, 7 aa, synthetic construct
NSLPRDG

SEQ ID NO: 10315 - protein, 7 aa, synthetic construct
RSMVSDG

SEQ ID NO: 10316 - protein, 7 aa, synthetic construct
GVSGSTL

SEQ ID NO: 10317 - protein, 7 aa, synthetic construct
NSVSGGS

SEQ ID NO: 10318 - protein, 7 aa, synthetic construct
TVAGQNA

SEQ ID NO: 10319 - protein, 7 aa, synthetic construct
PGGGTLA

SEQ ID NO: 10320 - protein, 7 aa, synthetic construct
AGNYGTS

SEQ ID NO: 10321 - protein, 7 aa, synthetic construct
GSGVPLA

SEQ ID NO: 10322 - protein, 7 aa, synthetic construct
RGDGMAG

SEQ ID NO: 10323 - protein, 7 aa, synthetic construct
TLGGGLS

SEQ ID NO: 10324 - protein, 7 aa, synthetic construct
AIVNSPI

SEQ ID NO: 10325 - protein, 7 aa, synthetic construct
TGDSRTV

SEQ ID NO: 10326 - protein, 7 aa, synthetic construct
YPHTSIA

SEQ ID NO: 10327 - protein, 7 aa, synthetic construct
SVGSTGL

SEQ ID NO: 10328 - protein, 7 aa, synthetic construct
DSKGSPT

SEQ ID NO: 10329 - protein, 7 aa, synthetic construct
SKTGLGA

SEQ ID NO: 10330 - protein, 7 aa, synthetic construct
VSSGVLN

SEQ ID NO: 10331 - protein, 7 aa, synthetic construct
DLASHVH

SEQ ID NO: 10332 - protein, 7 aa, synthetic construct
MGAQMRM

SEQ ID NO: 10333 - protein, 7 aa, synthetic construct
AGLQLTG

SEQ ID NO: 10334 - protein, 7 aa, synthetic construct
IGSNTTI

SEQ ID NO: 10335 - protein, 7 aa, synthetic construct
VGTGATG

SEQ ID NO: 10336 - protein, 7 aa, synthetic construct
SQAVSLG

SEQ ID NO: 10337 - protein, 7 aa, synthetic construct
TTKLLVN

SEQ ID NO: 10338 - protein, 7 aa, synthetic construct
VDGRINS

SEQ ID NO: 10339 - protein, 7 aa, synthetic construct
KTNPSLL

SEQ ID NO: 10340 - protein, 7 aa, synthetic construct
AVREERS

SEQ ID NO: 10341 - protein, 7 aa, synthetic construct
NSINSVR

SEQ ID NO: 10342 - protein, 7 aa, synthetic construct
NVSGVTG

SEQ ID NO: 10343 - protein, 7 aa, synthetic construct
MQGLIGS

SEQ ID NO: 10344 - protein, 7 aa, synthetic construct
GEKIPAM

SEQ ID NO: 10345 - protein, 7 aa, synthetic construct
LFASSVA

SEQ ID NO: 10346 - protein, 7 aa, synthetic construct
KFGEAVP

SEQ ID NO: 10347 - protein, 7 aa, synthetic construct
RASVAND

SEQ ID NO: 10348 - protein, 7 aa, synthetic construct
GNSGVHS

SEQ ID NO: 10349 - protein, 7 aa, synthetic construct
PMGGSGT

SEQ ID NO: 10350 - protein, 7 aa, synthetic construct
GHVGMGQ

SEQ ID NO: 10351 - protein, 7 aa, synthetic construct
DKMVVLA

SEQ ID NO: 10352 - protein, 7 aa, synthetic construct
LSTMPRG

SEQ ID NO: 10353 - protein, 7 aa, synthetic construct
RGDMIST

SEQ ID NO: 10354 - protein, 7 aa, synthetic construct
GVTSQPR

SEQ ID NO: 10355 - protein, 7 aa, synthetic construct
RDSGKSS

SEQ ID NO: 10356 - protein, 7 aa, synthetic construct
VKTVIQV

SEQ ID NO: 10357 - protein, 7 aa, synthetic construct
GGKQVLS

SEQ ID NO: 10358 - protein, 7 aa, synthetic construct
PVRGDMT

SEQ ID NO: 10359 - protein, 7 aa, synthetic construct
LLGNRQA

SEQ ID NO: 10360 - protein, 7 aa, synthetic construct
ASLARGV

SEQ ID NO: 10361 - protein, 7 aa, synthetic construct
PVTGSSV

SEQ ID NO: 10362 - protein, 7 aa, synthetic construct
IQHNGIL

SEQ ID NO: 10363 - protein, 7 aa, synthetic construct
LQRGEGP

SEQ ID NO: 10364 - protein, 7 aa, synthetic construct
LGVVSTN

SEQ ID NO: 10365 - protein, 7 aa, synthetic construct
VTHGGGV

SEQ ID NO: 10366 - protein, 7 aa, synthetic construct
TIANNRV

SEQ ID NO: 10367 - protein, 7 aa, synthetic construct
ALQHSAA

SEQ ID NO: 10368 - protein, 7 aa, synthetic construct
FQGVGPS

SEQ ID NO: 10369 - protein, 7 aa, synthetic construct
QSISLER

SEQ ID NO: 10370 - protein, 7 aa, synthetic construct
VLRTHLS

SEQ ID NO: 10371 - protein, 7 aa, synthetic construct
NARQDMM

SEQ ID NO: 10372 - protein, 7 aa, synthetic construct
QINQVQK

SEQ ID NO: 10373 - protein, 7 aa, synthetic construct
FQREVDR

SEQ ID NO: 10374 - protein, 7 aa, synthetic construct
VSIGTSA

SEQ ID NO: 10375 - protein, 7 aa, synthetic construct
VSYSAEY

SEQ ID NO: 10376 - protein, 7 aa, synthetic construct
MSTGAER

SEQ ID NO: 10377 - protein, 7 aa, synthetic construct
MKGLVSN

SEQ ID NO: 10378 - protein, 7 aa, synthetic construct
PSGTGNA

SEQ ID NO: 10379 - protein, 7 aa, synthetic construct
QRDSGHL

SEQ ID NO: 10380 - protein, 7 aa, synthetic construct
VRVSDAV

SEQ ID NO: 10381 - protein, 7 aa, synthetic construct
NSDGRII

SEQ ID NO: 10382 - protein, 7 aa, synthetic construct
MASGLRE

SEQ ID NO: 10383 - protein, 7 aa, synthetic construct
GGRTSME

SEQ ID NO: 10384 - protein, 7 aa, synthetic construct
TADFKKA

SEQ ID NO: 10385 - protein, 7 aa, synthetic construct
DKTNSSA

SEQ ID NO: 10386 - protein, 7 aa, synthetic construct
FQGVLTG

SEQ ID NO: 10387 - protein, 7 aa, synthetic construct
WLGTTAS

SEQ ID NO: 10388 - protein, 7 aa, synthetic construct
STGEHGG

SEQ ID NO: 10389 - protein, 7 aa, synthetic construct
AVGPSGG

SEQ ID NO: 10390 - protein, 7 aa, synthetic construct
TVSQGLN

SEQ ID NO: 10391 - protein, 7 aa, synthetic construct
GRDVGVA

SEQ ID NO: 10392 - protein, 7 aa, synthetic construct
SYNSSVV

SEQ ID NO: 10393 - protein, 7 aa, synthetic construct
MATKFLD

SEQ ID NO: 10394 - protein, 7 aa, synthetic construct
HNSAMNE

SEQ ID NO: 10395 - protein, 7 aa, synthetic construct
QPVGALP

SEQ ID NO: 10396 - protein, 7 aa, synthetic construct
TSTVVSA

SEQ ID NO: 10397 - protein, 7 aa, synthetic construct
SISGGVI

SEQ ID NO: 10398 - protein, 7 aa, synthetic construct
LVSGSSH

SEQ ID NO: 10399 - protein, 7 aa, synthetic construct
TGGVGVT

SEQ ID NO: 10400 - protein, 7 aa, synthetic construct
YRNADMN

SEQ ID NO: 10401 - protein, 7 aa, synthetic construct
FHSEKIA

SEQ ID NO: 10402 - protein, 7 aa, synthetic construct
HQASVIQ

SEQ ID NO: 10403 - protein, 7 aa, synthetic construct
FNSSGKG

SEQ ID NO: 10404 - protein, 7 aa, synthetic construct
SPEYRLG

SEQ ID NO: 10405 - protein, 7 aa, synthetic construct
GVLRSEG

SEQ ID NO: 10406 - protein, 7 aa, synthetic construct
SQSVVHA

SEQ ID NO: 10407 - protein, 7 aa, synthetic construct
IRSVEQS

SEQ ID NO: 10408 - protein, 7 aa, synthetic construct
SVLSTGP

SEQ ID NO: 10409 - protein, 7 aa, synthetic construct
LKSAQSE

SEQ ID NO: 10410 - protein, 7 aa, synthetic construct
VPSAGVG

SEQ ID NO: 10411 - protein, 7 aa, synthetic construct
VGASGLR

SEQ ID NO: 10412 - protein, 7 aa, synthetic construct
VLRGDTY

SEQ ID NO: 10413 - protein, 7 aa, synthetic construct
TIPLRNQ

SEQ ID NO: 10414 - protein, 7 aa, synthetic construct
QRESGYS

SEQ ID NO: 10415 - protein, 7 aa, synthetic construct
GWVEVQS

SEQ ID NO: 10416 - protein, 7 aa, synthetic construct
ALGPRDS

SEQ ID NO: 10417 - protein, 7 aa, synthetic construct
PVPGSSV

SEQ ID NO: 10418 - protein, 7 aa, synthetic construct
NGHMKLE

SEQ ID NO: 10419 - protein, 7 aa, synthetic construct
LHLVSTP

SEQ ID NO: 10420 - protein, 7 aa, synthetic construct
AGITGSG

SEQ ID NO: 10421 - protein, 7 aa, synthetic construct
PAVGTPS

SEQ ID NO: 10422 - protein, 7 aa, synthetic construct
SHATADL

SEQ ID NO: 10423 - protein, 7 aa, synthetic construct
FGASSVA

SEQ ID NO: 10424 - protein, 7 aa, synthetic construct
NHKESTV

SEQ ID NO: 10425 - protein, 7 aa, synthetic construct
HSVSPTS

SEQ ID NO: 10426 - protein, 7 aa, synthetic construct
FASAAMG

SEQ ID NO: 10427 - protein, 7 aa, synthetic construct
AGLVHTV

SEQ ID NO: 10428 - protein, 7 aa, synthetic construct
DRSSVLN

SEQ ID NO: 10429 - protein, 7 aa, synthetic construct
AGNYAGV

SEQ ID NO: 10430 - protein, 7 aa, synthetic construct
FVSSTTA

SEQ ID NO: 10431 - protein, 7 aa, synthetic construct
DSISRSV

SEQ ID NO: 10432 - protein, 7 aa, synthetic construct
HSMGKPM

SEQ ID NO: 10433 - protein, 7 aa, synthetic construct
GRGGGSC

SEQ ID NO: 10434 - protein, 7 aa, synthetic construct
WVATVSR

SEQ ID NO: 10435 - protein, 7 aa, synthetic construct
SDRGSSV

SEQ ID NO: 10436 - protein, 7 aa, synthetic construct
REETRLP

SEQ ID NO: 10437 - protein, 7 aa, synthetic construct
RLGFLTD

SEQ ID NO: 10438 - protein, 7 aa, synthetic construct
YMDTGSM

SEQ ID NO: 10439 - protein, 7 aa, synthetic construct
TAKPQPI

SEQ ID NO: 10440 - protein, 7 aa, synthetic construct
TYSGMGA

SEQ ID NO: 10441 - protein, 7 aa, synthetic construct
GMRFGTT

SEQ ID NO: 10442 - protein, 7 aa, synthetic construct
TSVNAMA

SEQ ID NO: 10443 - protein, 7 aa, synthetic construct
TFSASGS

SEQ ID NO: 10444 - protein, 7 aa, synthetic construct
EGSFNRS

SEQ ID NO: 10445 - protein, 7 aa, synthetic construct
EQRNAES

SEQ ID NO: 10446 - protein, 7 aa, synthetic construct
LTPALGT

SEQ ID NO: 10447 - protein, 7 aa, synthetic construct
IGTSGGV

SEQ ID NO: 10448 - protein, 7 aa, synthetic construct
NARLLTA

SEQ ID NO: 10449 - protein, 7 aa, synthetic construct
GSSGSVR

SEQ ID NO: 10450 - protein, 7 aa, synthetic construct
AHEINGD

SEQ ID NO: 10451 - protein, 7 aa, synthetic construct
YNNSIER

SEQ ID NO: 10452 - protein, 7 aa, synthetic construct
SLHSSAQ

SEQ ID NO: 10453 - protein, 7 aa, synthetic construct
HGRTDTL

SEQ ID NO: 10454 - protein, 7 aa, synthetic construct
LTMSSHV

SEQ ID NO: 10455 - protein, 7 aa, synthetic construct
PAAVSRE

SEQ ID NO: 10456 - protein, 7 aa, synthetic construct
VVQRFSS

SEQ ID NO: 10457 - protein, 7 aa, synthetic construct
SLGKIVP

SEQ ID NO: 10458 - protein, 7 aa, synthetic construct
VFSSGLG

SEQ ID NO: 10459 - protein, 7 aa, synthetic construct
VTSVGNS

SEQ ID NO: 10460 - protein, 7 aa, synthetic construct
FTGGHLA

SEQ ID NO: 10461 - protein, 7 aa, synthetic construct
TTLGISG

SEQ ID NO: 10462 - protein, 7 aa, synthetic construct
VKALALA

SEQ ID NO: 10463 - protein, 7 aa, synthetic construct
TAAYSER

SEQ ID NO: 10464 - protein, 7 aa, synthetic construct
DARMSHG

SEQ ID NO: 10465 - protein, 7 aa, synthetic construct
EQRVNEK

SEQ ID NO: 10466 - protein, 7 aa, synthetic construct
SVGGFPR

SEQ ID NO: 10467 - protein, 7 aa, synthetic construct
SDGAQVR

SEQ ID NO: 10468 - protein, 7 aa, synthetic construct
MTSLSVA

SEQ ID NO: 10469 - protein, 7 aa, synthetic construct
NREVADH

SEQ ID NO: 10470 - protein, 7 aa, synthetic construct
TGVGSHA

SEQ ID NO: 10471 - protein, 7 aa, synthetic construct
QFQRSDE

SEQ ID NO: 10472 - protein, 7 aa, synthetic construct
LPGYSSS

SEQ ID NO: 10473 - protein, 7 aa, synthetic construct
VGARGPV

SEQ ID NO: 10474 - protein, 7 aa, synthetic construct
LEQSHVT

SEQ ID NO: 10475 - protein, 7 aa, synthetic construct
LFGGVAA

SEQ ID NO: 10476 - protein, 7 aa, synthetic construct
TDNLGVF

SEQ ID NO: 10477 - protein, 7 aa, synthetic construct
SVKLGST

SEQ ID NO: 10478 - protein, 7 aa, synthetic construct
RAAAVGL

SEQ ID NO: 10479 - protein, 7 aa, synthetic construct
LVRIGGA

SEQ ID NO: 10480 - protein, 7 aa, synthetic construct
LRGMSNG

SEQ ID NO: 10481 - protein, 7 aa, synthetic construct
SMRSGDN

SEQ ID NO: 10482 - protein, 7 aa, synthetic construct
LGISYAA

SEQ ID NO: 10483 - protein, 7 aa, synthetic construct
LSIEMRG

SEQ ID NO: 10484 - protein, 7 aa, synthetic construct
LPAVTLS

SEQ ID NO: 10485 - protein, 7 aa, synthetic construct
NMGVQGI

SEQ ID NO: 10486 - protein, 7 aa, synthetic construct
VRTSEMS

SEQ ID NO: 10487 - protein, 7 aa, synthetic construct
EQDRRTT

SEQ ID NO: 10488 - protein, 7 aa, synthetic construct
MSSRLNA

SEQ ID NO: 10489 - protein, 7 aa, synthetic construct
SRGDENS

SEQ ID NO: 10490 - protein, 7 aa, synthetic construct
DGVHRPS

SEQ ID NO: 10491 - protein, 7 aa, synthetic construct
GPSASPG

SEQ ID NO: 10492 - protein, 7 aa, synthetic construct
TTQGPKP

SEQ ID NO: 10493 - protein, 7 aa, synthetic construct
MGDPRTV

SEQ ID NO: 10494 - protein, 7 aa, synthetic construct
NQNRGSA

SEQ ID NO: 10495 - protein, 7 aa, synthetic construct
FRNDQSS

SEQ ID NO: 10496 - protein, 7 aa, synthetic construct
RTVDARI

SEQ ID NO: 10497 - protein, 7 aa, synthetic construct
TRNFDVA

SEQ ID NO: 10498 - protein, 7 aa, synthetic construct
AVQEARN

SEQ ID NO: 10499 - protein, 7 aa, synthetic construct
VSLATAG

SEQ ID NO: 10500 - protein, 7 aa, synthetic construct
LGVSWKG

SEQ ID NO: 10501 - protein, 7 aa, synthetic construct
FDQKSPY

SEQ ID NO: 10502 - protein, 7 aa, synthetic construct
SYTTSFA

SEQ ID NO: 10503 - protein, 7 aa, synthetic construct
LHNGNDG

SEQ ID NO: 10504 - protein, 7 aa, synthetic construct
HVSGSII

SEQ ID NO: 10505 - protein, 7 aa, synthetic construct
LRGLSTG

SEQ ID NO: 10506 - protein, 7 aa, synthetic construct
VRTSEMG

SEQ ID NO: 10507 - protein, 7 aa, synthetic construct
IGSTYVS

SEQ ID NO: 10508 - protein, 7 aa, synthetic construct
TGRGTEH

SEQ ID NO: 10509 - protein, 7 aa, synthetic construct
YPGKEGI

SEQ ID NO: 10510 - protein, 7 aa, synthetic construct
AVANVPM

SEQ ID NO: 10511 - protein, 7 aa, synthetic construct
VPSSSII

SEQ ID NO: 10512 - protein, 7 aa, synthetic construct
LLAQVSS

SEQ ID NO: 10513 - protein, 7 aa, synthetic construct
ITPGSVP

SEQ ID NO: 10514 - protein, 7 aa, synthetic construct
TFTSSVS

SEQ ID NO: 10515 - protein, 7 aa, synthetic construct
VLHLEQP

SEQ ID NO: 10516 - protein, 7 aa, synthetic construct
LPRGEGA

SEQ ID NO: 10517 - protein, 7 aa, synthetic construct
LPRGGGA

SEQ ID NO: 10518 - protein, 7 aa, synthetic construct
DSSAPRA

SEQ ID NO: 10519 - protein, 7 aa, synthetic construct
LSGGTLD

SEQ ID NO: 10520 - protein, 7 aa, synthetic construct
HGASVPS

SEQ ID NO: 10521 - protein, 7 aa, synthetic construct
MRNTVAS

SEQ ID NO: 10522 - protein, 7 aa, synthetic construct
SVFTIQG

SEQ ID NO: 10523 - protein, 7 aa, synthetic construct
VKPNSSA

SEQ ID NO: 10524 - protein, 7 aa, synthetic construct
YLSRMNA

SEQ ID NO: 10525 - protein, 7 aa, synthetic construct
GLIKNAT

SEQ ID NO: 10526 - protein, 7 aa, synthetic construct
GLIGPSG

SEQ ID NO: 10527 - protein, 7 aa, synthetic construct
TRVADTD

SEQ ID NO: 10528 - protein, 7 aa, synthetic construct
TGGVGVM

SEQ ID NO: 10529 - protein, 7 aa, synthetic construct
ERLSDKG

SEQ ID NO: 10530 - protein, 7 aa, synthetic construct
IMGQGDG

SEQ ID NO: 10531 - protein, 7 aa, synthetic construct
RSGYVTA

SEQ ID NO: 10532 - protein, 7 aa, synthetic construct
IMSQGRS

SEQ ID NO: 10533 - protein, 7 aa, synthetic construct
HEKVGPL

SEQ ID NO: 10534 - protein, 7 aa, synthetic construct
MRATDSP

SEQ ID NO: 10535 - protein, 7 aa, synthetic construct
LTGSAYS

SEQ ID NO: 10536 - protein, 7 aa, synthetic construct
ANSGVHS

SEQ ID NO: 10537 - protein, 7 aa, synthetic construct
FHGSSTA

SEQ ID NO: 10538 - protein, 7 aa, synthetic construct
GGVGAVI

SEQ ID NO: 10539 - protein, 7 aa, synthetic construct
SSIPSQA

SEQ ID NO: 10540 - protein, 7 aa, synthetic construct
GVMTSMP

SEQ ID NO: 10541 - protein, 7 aa, synthetic construct
QSNVVRG

SEQ ID NO: 10542 - protein, 7 aa, synthetic construct
FSQSSSR

SEQ ID NO: 10543 - protein, 7 aa, synthetic construct
SVNTGGQ

SEQ ID NO: 10544 - protein, 7 aa, synthetic construct
PSDSLVR

SEQ ID NO: 10545 - protein, 7 aa, synthetic construct
LAGRDVM

SEQ ID NO: 10546 - protein, 7 aa, synthetic construct
VNSPTVR

SEQ ID NO: 10547 - protein, 7 aa, synthetic construct
FSSQPPS

SEQ ID NO: 10548 - protein, 7 aa, synthetic construct
NLRSAEN

SEQ ID NO: 10549 - protein, 7 aa, synthetic construct
LKGMVGP

SEQ ID NO: 10550 - protein, 7 aa, synthetic construct
QGGVAEP

SEQ ID NO: 10551 - protein, 7 aa, synthetic construct
TVGQART

SEQ ID NO: 10552 - protein, 7 aa, synthetic construct
GQRSDVY

SEQ ID NO: 10553 - protein, 7 aa, synthetic construct
GQALERS

SEQ ID NO: 10554 - protein, 7 aa, synthetic construct
LNQGSSP

SEQ ID NO: 10555 - protein, 7 aa, synthetic construct
TVGVTGH

SEQ ID NO: 10556 - protein, 7 aa, synthetic construct
GLNTPRD

SEQ ID NO: 10557 - protein, 7 aa, synthetic construct
IVQVAPA

SEQ ID NO: 10558 - protein, 7 aa, synthetic construct
SSQLITG

SEQ ID NO: 10559 - protein, 7 aa, synthetic construct
LRSVPLG

SEQ ID NO: 10560 - protein, 7 aa, synthetic construct
GRREGFS

SEQ ID NO: 10561 - protein, 7 aa, synthetic construct
RSVSPTS

SEQ ID NO: 10562 - protein, 7 aa, synthetic construct
QVHSPAG

SEQ ID NO: 10563 - protein, 7 aa, synthetic construct
GSGGGPT

SEQ ID NO: 10564 - protein, 7 aa, synthetic construct
LVARSDL

SEQ ID NO: 10565 - protein, 7 aa, synthetic construct
SVLMGKA

SEQ ID NO: 10566 - protein, 7 aa, synthetic construct
GARNTLT

SEQ ID NO: 10567 - protein, 7 aa, synthetic construct
LRGLGTG

SEQ ID NO: 10568 - protein, 7 aa, synthetic construct
QGMQGTR

SEQ ID NO: 10569 - protein, 7 aa, synthetic construct
ARLGSTT

SEQ ID NO: 10570 - protein, 7 aa, synthetic construct
ATRMHVG

SEQ ID NO: 10571 - protein, 7 aa, synthetic construct
AIKGIGA

SEQ ID NO: 10572 - protein, 7 aa, synthetic construct
VLGVDRS

SEQ ID NO: 10573 - protein, 7 aa, synthetic construct
RESTSVD

SEQ ID NO: 10574 - protein, 7 aa, synthetic construct
SNQSTSR

SEQ ID NO: 10575 - protein, 7 aa, synthetic construct
IVSAERA

SEQ ID NO: 10576 - protein, 7 aa, synthetic construct
VLHLAQP

SEQ ID NO: 10577 - protein, 7 aa, synthetic construct
DKGVMGY

SEQ ID NO: 10578 - protein, 7 aa, synthetic construct
GPAGVTR

SEQ ID NO: 10579 - protein, 7 aa, synthetic construct
RLLGNND

SEQ ID NO: 10580 - protein, 7 aa, synthetic construct
TFDARGG

SEQ ID NO: 10581 - protein, 7 aa, synthetic construct
IMSQGLS

SEQ ID NO: 10582 - protein, 7 aa, synthetic construct
ITATVVT

SEQ ID NO: 10583 - protein, 7 aa, synthetic construct
SMSHHVA

SEQ ID NO: 10584 - protein, 7 aa, synthetic construct
GVRTAEA

SEQ ID NO: 10585 - protein, 7 aa, synthetic construct
DRGVMGY

SEQ ID NO: 10586 - protein, 7 aa, synthetic construct
GRDGAIP

SEQ ID NO: 10587 - protein, 7 aa, synthetic construct
VQRLQVP

SEQ ID NO: 10588 - protein, 7 aa, synthetic construct
GEHAGRP

SEQ ID NO: 10589 - protein, 7 aa, synthetic construct
GPSRAVG

SEQ ID NO: 10590 - protein, 7 aa, synthetic construct
TRSASDE

SEQ ID NO: 10591 - protein, 7 aa, synthetic construct
YMDTESM

SEQ ID NO: 10592 - protein, 7 aa, synthetic construct
QTLGQIS

SEQ ID NO: 10593 - protein, 7 aa, synthetic construct
SLRVTER

SEQ ID NO: 10594 - protein, 7 aa, synthetic construct
INSVHSA

SEQ ID NO: 10595 - protein, 7 aa, synthetic construct
WPKTVDV

SEQ ID NO: 10596 - protein, 7 aa, synthetic construct
VGSVASA

SEQ ID NO: 10597 - protein, 7 aa, synthetic construct
GLVVPAG

SEQ ID NO: 10598 - protein, 7 aa, synthetic construct
YVSTVDL

SEQ ID NO: 10599 - protein, 7 aa, synthetic construct
LRGLSNG

SEQ ID NO: 10600 - protein, 7 aa, synthetic construct
VLDVRLG

SEQ ID NO: 10601 - protein, 7 aa, synthetic construct
LKNATIS

SEQ ID NO: 10602 - protein, 7 aa, synthetic construct
HSSLAGS

SEQ ID NO: 10603 - protein, 7 aa, synthetic construct
YGKVGPI

SEQ ID NO: 10604 - protein, 7 aa, synthetic construct
TSAKHTP

SEQ ID NO: 10605 - protein, 7 aa, synthetic construct
VAGNAVL

SEQ ID NO: 10606 - protein, 7 aa, synthetic construct
GSSGAHL

SEQ ID NO: 10607 - protein, 7 aa, synthetic construct
NGMSGNG

SEQ ID NO: 10608 - protein, 7 aa, synthetic construct
LDSRKSS

SEQ ID NO: 10609 - protein, 7 aa, synthetic construct
RSGFVSA

SEQ ID NO: 10610 - protein, 7 aa, synthetic construct
SRYSAVP

SEQ ID NO: 10611 - protein, 7 aa, synthetic construct
LRGPVNG

SEQ ID NO: 10612 - protein, 7 aa, synthetic construct
QHLPTSG

SEQ ID NO: 10613 - protein, 7 aa, synthetic construct
GGRVVSG

SEQ ID NO: 10614 - protein, 7 aa, synthetic construct
EGRISYA

SEQ ID NO: 10615 - protein, 7 aa, synthetic construct
RVDSSGG

SEQ ID NO: 10616 - protein, 7 aa, synthetic construct
SNRMTGP

SEQ ID NO: 10617 - protein, 7 aa, synthetic construct
MGRQGLG

SEQ ID NO: 10618 - protein, 7 aa, synthetic construct
GLTSVIL

SEQ ID NO: 10619 - protein, 7 aa, synthetic construct
NMSGGSR

SEQ ID NO: 10620 - protein, 7 aa, synthetic construct
FVASGVS

SEQ ID NO: 10621 - protein, 7 aa, synthetic construct
QVRHMLE

SEQ ID NO: 10622 - protein, 7 aa, synthetic construct
LHNSMPG

SEQ ID NO: 10623 - protein, 7 aa, synthetic construct
TVPGEVA

SEQ ID NO: 10624 - protein, 7 aa, synthetic construct
SKTAVLT

SEQ ID NO: 10625 - protein, 7 aa, synthetic construct
LTGSPPM

SEQ ID NO: 10626 - protein, 7 aa, synthetic construct
SDVQRVT

SEQ ID NO: 10627 - protein, 7 aa, synthetic construct
AVSGVPR

SEQ ID NO: 10628 - protein, 7 aa, synthetic construct
GLTSQPP

SEQ ID NO: 10629 - protein, 7 aa, synthetic construct
AGHYGTS

SEQ ID NO: 10630 - protein, 7 aa, synthetic construct
TIRHTNG

SEQ ID NO: 10631 - protein, 7 aa, synthetic construct
LVMSDRP

SEQ ID NO: 10632 - protein, 7 aa, synthetic construct
GNGVISG

SEQ ID NO: 10633 - protein, 7 aa, synthetic construct
RADATKS

SEQ ID NO: 10634 - protein, 7 aa, synthetic construct
LRGDGST

SEQ ID NO: 10635 - protein, 7 aa, synthetic construct
KMTSESR

SEQ ID NO: 10636 - protein, 7 aa, synthetic construct
FSQSPSS

SEQ ID NO: 10637 - protein, 7 aa, synthetic construct
EKGFSVA

SEQ ID NO: 10638 - protein, 7 aa, synthetic construct
HDRGTAA

SEQ ID NO: 10639 - protein, 7 aa, synthetic construct
TNGASTY

SEQ ID NO: 10640 - protein, 7 aa, synthetic construct
PDSGKSS

SEQ ID NO: 10641 - protein, 7 aa, synthetic construct
GQSRYGS

SEQ ID NO: 10642 - protein, 7 aa, synthetic construct
KLEFATG

SEQ ID NO: 10643 - protein, 7 aa, synthetic construct
FVANRGQ

SEQ ID NO: 10644 - protein, 7 aa, synthetic construct
SAYQAQL

SEQ ID NO: 10645 - protein, 7 aa, synthetic construct
YSDGPGS

SEQ ID NO: 10646 - protein, 7 aa, synthetic construct
LGGLSTP

SEQ ID NO: 10647 - protein, 7 aa, synthetic construct
LNGGRST

SEQ ID NO: 10648 - protein, 7 aa, synthetic construct
PGSSHMG

SEQ ID NO: 10649 - protein, 7 aa, synthetic construct
RQSSLVV

SEQ ID NO: 10650 - protein, 7 aa, synthetic construct
TRSVTYP

SEQ ID NO: 10651 - protein, 7 aa, synthetic construct
VSAAAGT

SEQ ID NO: 10652 - protein, 7 aa, synthetic construct
HGVIVTV

SEQ ID NO: 10653 - protein, 7 aa, synthetic construct
YVRTVDI

SEQ ID NO: 10654 - protein, 7 aa, synthetic construct
SVSSLGL

SEQ ID NO: 10655 - protein, 7 aa, synthetic construct
SQGVPRS

SEQ ID NO: 10656 - protein, 7 aa, synthetic construct
AWANVSS

SEQ ID NO: 10657 - protein, 7 aa, synthetic construct
RMDNKQG

SEQ ID NO: 10658 - protein, 7 aa, synthetic construct
PAKHTTS

SEQ ID NO: 10659 - protein, 7 aa, synthetic construct
GEIRLSP

SEQ ID NO: 10660 - protein, 7 aa, synthetic construct
TGHVVDG

SEQ ID NO: 10661 - protein, 7 aa, synthetic construct
ERTPLLL

SEQ ID NO: 10662 - protein, 7 aa, synthetic construct
RSQNGGF

SEQ ID NO: 10663 - protein, 7 aa, synthetic construct
SDGAQVG

SEQ ID NO: 10664 - protein, 7 aa, synthetic construct
VDHHFTG

SEQ ID NO: 10665 - protein, 7 aa, synthetic construct
RVPVSQV

SEQ ID NO: 10666 - protein, 7 aa, synthetic construct
SPSSRGG

SEQ ID NO: 10667 - protein, 7 aa, synthetic construct
LKSAYMS

SEQ ID NO: 10668 - protein, 7 aa, synthetic construct
VMRDNYG

SEQ ID NO: 10669 - protein, 7 aa, synthetic construct
MGAQLRM

SEQ ID NO: 10670 - protein, 7 aa, synthetic construct
VVKGFSN

SEQ ID NO: 10671 - protein, 7 aa, synthetic construct
TDRSMVA

SEQ ID NO: 10672 - protein, 7 aa, synthetic construct
VNAASLM

SEQ ID NO: 10673 - protein, 7 aa, synthetic construct
TRVINSS

SEQ ID NO: 10674 - protein, 7 aa, synthetic construct
GKGFSPN

SEQ ID NO: 10675 - protein, 7 aa, synthetic construct
AVSGGRP

SEQ ID NO: 10676 - protein, 7 aa, synthetic construct
NVFSSNG

SEQ ID NO: 10677 - protein, 7 aa, synthetic construct
LVVREPM

SEQ ID NO: 10678 - protein, 7 aa, synthetic construct
DSGHSHS

SEQ ID NO: 10679 - protein, 7 aa, synthetic construct
PVRDAYS

SEQ ID NO: 10680 - protein, 7 aa, synthetic construct
IGRVVSS

SEQ ID NO: 10681 - protein, 7 aa, synthetic construct
SSVILET

SEQ ID NO: 10682 - protein, 7 aa, synthetic construct
VIRVGTA

SEQ ID NO: 10683 - protein, 7 aa, synthetic construct
SAGLVTL

SEQ ID NO: 10684 - protein, 7 aa, synthetic construct
SLGSSIS

SEQ ID NO: 10685 - protein, 7 aa, synthetic construct
VQRVLPN

SEQ ID NO: 10686 - protein, 7 aa, synthetic construct
AGARIPL

SEQ ID NO: 10687 - protein, 7 aa, synthetic construct
SRPGVEV

SEQ ID NO: 10688 - protein, 7 aa, synthetic construct
QPRDVSR

SEQ ID NO: 10689 - protein, 7 aa, synthetic construct
GGTKTIS

SEQ ID NO: 10690 - protein, 7 aa, synthetic construct
SAGLRMT

SEQ ID NO: 10691 - protein, 7 aa, synthetic construct
KQEYSTG

SEQ ID NO: 10692 - protein, 7 aa, synthetic construct
IGRMSGN

SEQ ID NO: 10693 - protein, 7 aa, synthetic construct
GTYVGQS

SEQ ID NO: 10694 - protein, 7 aa, synthetic construct
THATKSG

SEQ ID NO: 10695 - protein, 7 aa, synthetic construct
NAISSRS

SEQ ID NO: 10696 - protein, 7 aa, synthetic construct
GISGVHS

SEQ ID NO: 10697 - protein, 7 aa, synthetic construct
LRSDDVR

SEQ ID NO: 10698 - protein, 7 aa, synthetic construct
SLGKASA

SEQ ID NO: 10699 - protein, 7 aa, synthetic construct
QSKVVGG

SEQ ID NO: 10700 - protein, 7 aa, synthetic construct
VGLGSSA

SEQ ID NO: 10701 - protein, 7 aa, synthetic construct
SVRVGPT

SEQ ID NO: 10702 - protein, 7 aa, synthetic construct
VARELGS

SEQ ID NO: 10703 - protein, 7 aa, synthetic construct
SRPNDGA

SEQ ID NO: 10704 - protein, 7 aa, synthetic construct
VAVRALA

SEQ ID NO: 10705 - protein, 7 aa, synthetic construct
NSVGPGS

SEQ ID NO: 10706 - protein, 7 aa, synthetic construct
AVSGVQR

SEQ ID NO: 10707 - protein, 7 aa, synthetic construct
RHASIDI

SEQ ID NO: 10708 - protein, 7 aa, synthetic construct
SARTGTF

SEQ ID NO: 10709 - protein, 7 aa, synthetic construct
RTGVITA

SEQ ID NO: 10710 - protein, 7 aa, synthetic construct
AREIGPN

SEQ ID NO: 10711 - protein, 7 aa, synthetic construct
VRSLMAD

SEQ ID NO: 10712 - protein, 7 aa, synthetic construct
RSGIQSS

SEQ ID NO: 10713 - protein, 7 aa, synthetic construct
DTVRGPI

SEQ ID NO: 10714 - protein, 7 aa, synthetic construct
LGVKLSS

SEQ ID NO: 10715 - protein, 7 aa, synthetic construct
VMVKQSG

SEQ ID NO: 10716 - protein, 7 aa, synthetic construct
RGSGSIA

SEQ ID NO: 10717 - protein, 7 aa, synthetic construct
MNMPNTV

SEQ ID NO: 10718 - protein, 7 aa, synthetic construct
GRSADLP

SEQ ID NO: 10719 - protein, 7 aa, synthetic construct
LPMSNKA

SEQ ID NO: 10720 - protein, 7 aa, synthetic construct
MLGAVTS

SEQ ID NO: 10721 - protein, 7 aa, synthetic construct
KSGDNTA

SEQ ID NO: 10722 - protein, 7 aa, synthetic construct
PALSKGG

SEQ ID NO: 10723 - protein, 7 aa, synthetic construct
SDGSYKV

SEQ ID NO: 10724 - protein, 7 aa, synthetic construct
TGGLGVT

SEQ ID NO: 10725 - protein, 7 aa, synthetic construct
AGTTQSR

SEQ ID NO: 10726 - protein, 7 aa, synthetic construct
MGAQGVR

SEQ ID NO: 10727 - protein, 7 aa, synthetic construct
VGTSRGA

SEQ ID NO: 10728 - protein, 7 aa, synthetic construct
EQHIVAS

SEQ ID NO: 10729 - protein, 7 aa, synthetic construct
HFSEIRP

SEQ ID NO: 10730 - protein, 7 aa, synthetic construct
GSSGSLR

SEQ ID NO: 10731 - protein, 7 aa, synthetic construct
VGASRAS

SEQ ID NO: 10732 - protein, 7 aa, synthetic construct
QSRTLAA

SEQ ID NO: 10733 - protein, 7 aa, synthetic construct
LRSDGVR

SEQ ID NO: 10734 - protein, 7 aa, synthetic construct
ISRSEIA

SEQ ID NO: 10735 - protein, 7 aa, synthetic construct
SQRNVSS

SEQ ID NO: 10736 - protein, 7 aa, synthetic construct
THDRGGT

SEQ ID NO: 10737 - protein, 7 aa, synthetic construct
QGISYAA

SEQ ID NO: 10738 - protein, 7 aa, synthetic construct
STERKGP

SEQ ID NO: 10739 - protein, 7 aa, synthetic construct
RGDTVGD

SEQ ID NO: 10740 - protein, 7 aa, synthetic construct
MPSVQGV

SEQ ID NO: 10741 - protein, 7 aa, synthetic construct
PESKASA

SEQ ID NO: 10742 - protein, 7 aa, synthetic construct
MGDPRMM

SEQ ID NO: 10743 - protein, 7 aa, synthetic construct
GVTYQTR

SEQ ID NO: 10744 - protein, 7 aa, synthetic construct
IGKSTAT

SEQ ID NO: 10745 - protein, 7 aa, synthetic construct
NVASSRV

SEQ ID NO: 10746 - protein, 7 aa, synthetic construct
VHADGSL

SEQ ID NO: 10747 - protein, 7 aa, synthetic construct
VGFPLKG

SEQ ID NO: 10748 - protein, 7 aa, synthetic construct
TGGGSGT

SEQ ID NO: 10749 - protein, 7 aa, synthetic construct
SGNLIAS

SEQ ID NO: 10750 - protein, 7 aa, synthetic construct
LKETWVA

SEQ ID NO: 10751 - protein, 7 aa, synthetic construct
IRSDGVR

SEQ ID NO: 10752 - protein, 7 aa, synthetic construct
AVNAVPG

SEQ ID NO: 10753 - protein, 7 aa, synthetic construct
HSRLSSS

SEQ ID NO: 10754 - protein, 7 aa, synthetic construct
NAPRESS

SEQ ID NO: 10755 - protein, 7 aa, synthetic construct
FRNGVAG

SEQ ID NO: 10756 - protein, 7 aa, synthetic construct
REGNSRN

SEQ ID NO: 10757 - protein, 7 aa, synthetic construct
DKTVTTL

SEQ ID NO: 10758 - protein, 7 aa, synthetic construct
RSISGGT

SEQ ID NO: 10759 - protein, 7 aa, synthetic construct
SRLPIHE

SEQ ID NO: 10760 - protein, 7 aa, synthetic construct
MEKEARA

SEQ ID NO: 10761 - protein, 7 aa, synthetic construct
ATGTKAF

SEQ ID NO: 10762 - protein, 7 aa, synthetic construct
NNYVHSA

SEQ ID NO: 10763 - protein, 7 aa, synthetic construct
TVRSTTI

SEQ ID NO: 10764 - protein, 7 aa, synthetic construct
TLVSRTG

SEQ ID NO: 10765 - protein, 7 aa, synthetic construct
GRAADNT

SEQ ID NO: 10766 - protein, 7 aa, synthetic construct
VRGIDVT

SEQ ID NO: 10767 - protein, 7 aa, synthetic construct
LGISGSV

SEQ ID NO: 10768 - protein, 7 aa, synthetic construct
YVRTLDL

SEQ ID NO: 10769 - protein, 7 aa, synthetic construct
FPRGNVA

SEQ ID NO: 10770 - protein, 7 aa, synthetic construct
ERGIPGA

SEQ ID NO: 10771 - protein, 7 aa, synthetic construct
LSGRVLA

SEQ ID NO: 10772 - protein, 7 aa, synthetic construct
LGTTDGG

SEQ ID NO: 10773 - protein, 7 aa, synthetic construct
LGAQNAR

SEQ ID NO: 10774 - protein, 7 aa, synthetic construct
TMHGASH

SEQ ID NO: 10775 - protein, 7 aa, synthetic construct
SEKVSVT

SEQ ID NO: 10776 - protein, 7 aa, synthetic construct
AGNTQSQ

SEQ ID NO: 10777 - protein, 7 aa, synthetic construct
SSRGTVG

SEQ ID NO: 10778 - protein, 7 aa, synthetic construct
SGAVRQL

SEQ ID NO: 10779 - protein, 7 aa, synthetic construct
VERSVPS

SEQ ID NO: 10780 - protein, 7 aa, synthetic construct
GGQKSLN

SEQ ID NO: 10781 - protein, 7 aa, synthetic construct
KAVVMGS

SEQ ID NO: 10782 - protein, 7 aa, synthetic construct
LGHTLSS

SEQ ID NO: 10783 - protein, 7 aa, synthetic construct
SKDMRTT

SEQ ID NO: 10784 - protein, 7 aa, synthetic construct
LSVTSKA

SEQ ID NO: 10785 - protein, 7 aa, synthetic construct
VSRGTIS

SEQ ID NO: 10786 - protein, 7 aa, synthetic construct
SGVNVLY

SEQ ID NO: 10787 - protein, 7 aa, synthetic construct
TAQSVYE

SEQ ID NO: 10788 - protein, 7 aa, synthetic construct
WSGGPGL

SEQ ID NO: 10789 - protein, 7 aa, synthetic construct
VSGNRSV

SEQ ID NO: 10790 - protein, 7 aa, synthetic construct
STATRVL

SEQ ID NO: 10791 - protein, 7 aa, synthetic construct
DRQRESI

SEQ ID NO: 10792 - protein, 7 aa, synthetic construct
IGSVYRT

SEQ ID NO: 10793 - protein, 7 aa, synthetic construct
VNGTPSR

SEQ ID NO: 10794 - protein, 7 aa, synthetic construct
SRQTDTI

SEQ ID NO: 10795 - protein, 7 aa, synthetic construct
RVVRMDA

SEQ ID NO: 10796 - protein, 7 aa, synthetic construct
VSNYSPL

SEQ ID NO: 10797 - protein, 7 aa, synthetic construct
TNGRQGG

SEQ ID NO: 10798 - protein, 7 aa, synthetic construct
PRSGSES

SEQ ID NO: 10799 - protein, 7 aa, synthetic construct
TLRTEAL

SEQ ID NO: 10800 - protein, 7 aa, synthetic construct
LPRGGVH

SEQ ID NO: 10801 - protein, 7 aa, synthetic construct
SNGPAPG

SEQ ID NO: 10802 - protein, 7 aa, synthetic construct
GSQPRFS

SEQ ID NO: 10803 - protein, 7 aa, synthetic construct
AVIGTAT

SEQ ID NO: 10804 - protein, 7 aa, synthetic construct
RMADGGP

SEQ ID NO: 10805 - protein, 7 aa, synthetic construct
YLHASVE

SEQ ID NO: 10806 - protein, 7 aa, synthetic construct
ASQGATR

SEQ ID NO: 10807 - protein, 7 aa, synthetic construct
RTGHSGA

SEQ ID NO: 10808 - protein, 7 aa, synthetic construct
SNNQARM

SEQ ID NO: 10809 - protein, 7 aa, synthetic construct
AIPNSPI

SEQ ID NO: 10810 - protein, 7 aa, synthetic construct
RQSVIHA

SEQ ID NO: 10811 - protein, 7 aa, synthetic construct
ARIGNTQ

SEQ ID NO: 10812 - protein, 7 aa, synthetic construct
FSTNATS

SEQ ID NO: 10813 - protein, 7 aa, synthetic construct
SGVNVSS

SEQ ID NO: 10814 - protein, 7 aa, synthetic construct
LGSSWTG

SEQ ID NO: 10815 - protein, 7 aa, synthetic construct
FERMHTA

SEQ ID NO: 10816 - protein, 7 aa, synthetic construct
RQETRLP

SEQ ID NO: 10817 - protein, 7 aa, synthetic construct
VGATGAS

SEQ ID NO: 10818 - protein, 7 aa, synthetic construct
YNSGQGR

SEQ ID NO: 10819 - protein, 7 aa, synthetic construct
MTGSAYS

SEQ ID NO: 10820 - protein, 7 aa, synthetic construct
SRQSLSL

SEQ ID NO: 10821 - protein, 7 aa, synthetic construct
ASRAMNG

SEQ ID NO: 10822 - protein, 7 aa, synthetic construct
SYSRVAD

SEQ ID NO: 10823 - protein, 7 aa, synthetic construct
LMGSPRT

SEQ ID NO: 10824 - protein, 7 aa, synthetic construct
ARSAIGS

SEQ ID NO: 10825 - protein, 7 aa, synthetic construct
MKSQSGS

SEQ ID NO: 10826 - protein, 7 aa, synthetic construct
GRVSVNT

SEQ ID NO: 10827 - protein, 7 aa, synthetic construct
SRGDATI

SEQ ID NO: 10828 - protein, 7 aa, synthetic construct
FARDTQI

SEQ ID NO: 10829 - protein, 7 aa, synthetic construct
YSVGHGS

SEQ ID NO: 10830 - protein, 7 aa, synthetic construct
KVGVPYE

SEQ ID NO: 10831 - protein, 7 aa, synthetic construct
KQSGELS

SEQ ID NO: 10832 - protein, 7 aa, synthetic construct
AVVGSQL

SEQ ID NO: 10833 - protein, 7 aa, synthetic construct
SVSITHA

SEQ ID NO: 10834 - protein, 7 aa, synthetic construct
VAREMGI

SEQ ID NO: 10835 - protein, 7 aa, synthetic construct
ATDRVVR

SEQ ID NO: 10836 - protein, 7 aa, synthetic construct
VRAVGAA

SEQ ID NO: 10837 - protein, 7 aa, synthetic construct
SSTITAY

SEQ ID NO: 10838 - protein, 7 aa, synthetic construct
ATVRAIG

SEQ ID NO: 10839 - protein, 7 aa, synthetic construct
LPRGGGD

SEQ ID NO: 10840 - protein, 7 aa, synthetic construct
AFRVPET

SEQ ID NO: 10841 - protein, 7 aa, synthetic construct
KSSGGMV

SEQ ID NO: 10842 - protein, 7 aa, synthetic construct
SRDSGTR

SEQ ID NO: 10843 - protein, 7 aa, synthetic construct
KGSYPVS

SEQ ID NO: 10844 - protein, 7 aa, synthetic construct
ARELSMA

SEQ ID NO: 10845 - protein, 7 aa, synthetic construct
VTTSAIR

SEQ ID NO: 10846 - protein, 7 aa, synthetic construct
LGTRGDP

SEQ ID NO: 10847 - protein, 7 aa, synthetic construct
EGRVVVG

SEQ ID NO: 10848 - protein, 7 aa, synthetic construct
PGMKMSI

SEQ ID NO: 10849 - protein, 7 aa, synthetic construct
VSNRYPN

SEQ ID NO: 10850 - protein, 7 aa, synthetic construct
SNVQRVT

SEQ ID NO: 10851 - protein, 7 aa, synthetic construct
YVRTVEL

SEQ ID NO: 10852 - protein, 7 aa, synthetic construct
RQSVVHA

SEQ ID NO: 10853 - protein, 7 aa, synthetic construct
YLMTQVA

SEQ ID NO: 10854 - protein, 7 aa, synthetic construct
KLEFATR

SEQ ID NO: 10855 - protein, 7 aa, synthetic construct
RSGGSLT

SEQ ID NO: 10856 - protein, 7 aa, synthetic construct
AGGVSRL

SEQ ID NO: 10857 - protein, 7 aa, synthetic construct
WMGSNAS

SEQ ID NO: 10858 - protein, 7 aa, synthetic construct
RGASVGP

SEQ ID NO: 10859 - protein, 7 aa, synthetic construct
YSVRPGS

SEQ ID NO: 10860 - protein, 7 aa, synthetic construct
SMKSVMT

SEQ ID NO: 10861 - protein, 7 aa, synthetic construct
AHANRGA

SEQ ID NO: 10862 - protein, 7 aa, synthetic construct
VEGASRI

SEQ ID NO: 10863 - protein, 7 aa, synthetic construct
LSHQFAA

SEQ ID NO: 10864 - protein, 7 aa, synthetic construct
VTSDRHY

SEQ ID NO: 10865 - protein, 7 aa, synthetic construct
RDPNSQR

SEQ ID NO: 10866 - protein, 7 aa, synthetic construct
MGVRGIG

SEQ ID NO: 10867 - protein, 7 aa, synthetic construct
TLGGVRF

SEQ ID NO: 10868 - protein, 7 aa, synthetic construct
RGDYGST

SEQ ID NO: 10869 - protein, 7 aa, synthetic construct
LNKYTDH

SEQ ID NO: 10870 - protein, 7 aa, synthetic construct
HSRLSSY

SEQ ID NO: 10871 - protein, 7 aa, synthetic construct
LQMTNRD

SEQ ID NO: 10872 - protein, 7 aa, synthetic construct
RGALLAT

SEQ ID NO: 10873 - protein, 7 aa, synthetic construct
LESTRLV

SEQ ID NO: 10874 - protein, 7 aa, synthetic construct
QMSTFPS

SEQ ID NO: 10875 - protein, 7 aa, synthetic construct
VSKSATM

SEQ ID NO: 10876 - protein, 7 aa, synthetic construct
AMRDTRS

SEQ ID NO: 10877 - protein, 7 aa, synthetic construct
WRSGSVA

SEQ ID NO: 10878 - protein, 7 aa, synthetic construct
RIEVAVG

SEQ ID NO: 10879 - protein, 7 aa, synthetic construct
FSSVGMT

SEQ ID NO: 10880 - protein, 7 aa, synthetic construct
SGAPAKS

SEQ ID NO: 10881 - protein, 7 aa, synthetic construct
VGLNSRY

SEQ ID NO: 10882 - protein, 7 aa, synthetic construct
QSPQTHT

SEQ ID NO: 10883 - protein, 7 aa, synthetic construct
NSRPVNV

SEQ ID NO: 10884 - protein, 7 aa, synthetic construct
FRAHSDS

SEQ ID NO: 10885 - protein, 7 aa, synthetic construct
ARGIGSN

SEQ ID NO: 10886 - protein, 7 aa, synthetic construct
KSTVASP

SEQ ID NO: 10887 - protein, 7 aa, synthetic construct
LRTAEMM

SEQ ID NO: 10888 - protein, 7 aa, synthetic construct
LRFENSV

SEQ ID NO: 10889 - protein, 7 aa, synthetic construct
VRSEAYS

SEQ ID NO: 10890 - protein, 7 aa, synthetic construct
ANNRTLG

SEQ ID NO: 10891 - protein, 7 aa, synthetic construct
GVSIRQT

SEQ ID NO: 10892 - protein, 7 aa, synthetic construct
GRLQGDR

SEQ ID NO: 10893 - protein, 7 aa, synthetic construct
RGGSDHT

SEQ ID NO: 10894 - protein, 7 aa, synthetic construct
VPSSVIV

SEQ ID NO: 10895 - protein, 7 aa, synthetic construct
INGVVRT

SEQ ID NO: 10896 - protein, 7 aa, synthetic construct
SSSGWTG

SEQ ID NO: 10897 - protein, 7 aa, synthetic construct
NTNASRT

SEQ ID NO: 10898 - protein, 7 aa, synthetic construct
ARTTQTQ

SEQ ID NO: 10899 - protein, 7 aa, synthetic construct
VVGAHRI

SEQ ID NO: 10900 - protein, 7 aa, synthetic construct
GRGLNAT

SEQ ID NO: 10901 - protein, 7 aa, synthetic construct
TSVGASP

SEQ ID NO: 10902 - protein, 7 aa, synthetic construct
ADQRNGS

SEQ ID NO: 10903 - protein, 7 aa, synthetic construct
KGAPLAY

SEQ ID NO: 10904 - protein, 7 aa, synthetic construct
VAHVAMG

SEQ ID NO: 10905 - protein, 7 aa, synthetic construct
VARVMGS

SEQ ID NO: 10906 - protein, 7 aa, synthetic construct
RVSGGNL

SEQ ID NO: 10907 - protein, 7 aa, synthetic construct
HTNVQHV

SEQ ID NO: 10908 - protein, 7 aa, synthetic construct
GSRMTMT

SEQ ID NO: 10909 - protein, 7 aa, synthetic construct
IVTSGST

SEQ ID NO: 10910 - protein, 7 aa, synthetic construct
SIATEVS

SEQ ID NO: 10911 - protein, 7 aa, synthetic construct
TSRGFAA

SEQ ID NO: 10912 - protein, 7 aa, synthetic construct
SRLDAGN

SEQ ID NO: 10913 - protein, 7 aa, synthetic construct
GVMGSDG

SEQ ID NO: 10914 - protein, 7 aa, synthetic construct
SLTHSQR

SEQ ID NO: 10915 - protein, 7 aa, synthetic construct
NVQSRLG

SEQ ID NO: 10916 - protein, 7 aa, synthetic construct
LPRGGGH

SEQ ID NO: 10917 - protein, 7 aa, synthetic construct
ARVADTE

SEQ ID NO: 10918 - protein, 7 aa, synthetic construct
SAKDTIG

SEQ ID NO: 10919 - protein, 7 aa, synthetic construct
LAKQGDY

SEQ ID NO: 10920 - protein, 7 aa, synthetic construct
SSGLANG

SEQ ID NO: 10921 - protein, 7 aa, synthetic construct
DHGVRTT

SEQ ID NO: 10922 - protein, 7 aa, synthetic construct
MGPVRDS

SEQ ID NO: 10923 - protein, 7 aa, synthetic construct
SRPVAES

SEQ ID NO: 10924 - protein, 7 aa, synthetic construct
IPGRAEV

SEQ ID NO: 10925 - protein, 7 aa, synthetic construct
TGRTPGL

SEQ ID NO: 10926 - protein, 7 aa, synthetic construct
KVPLTNV

SEQ ID NO: 10927 - protein, 7 aa, synthetic construct
SSLPRNG

SEQ ID NO: 10928 - protein, 7 aa, synthetic construct
IRNLGNT

SEQ ID NO: 10929 - protein, 7 aa, synthetic construct
SGLAIKN

SEQ ID NO: 10930 - protein, 7 aa, synthetic construct
TVSNMNM

SEQ ID NO: 10931 - protein, 7 aa, synthetic construct
SGSRGDG

SEQ ID NO: 10932 - protein, 7 aa, synthetic construct
GGSGIKY

SEQ ID NO: 10933 - protein, 7 aa, synthetic construct
NKVDGLR

SEQ ID NO: 10934 - protein, 7 aa, synthetic construct
GARLSHA

SEQ ID NO: 10935 - protein, 7 aa, synthetic construct
MRQSTDY

SEQ ID NO: 10936 - protein, 7 aa, synthetic construct
GRGGERV

SEQ ID NO: 10937 - protein, 7 aa, synthetic construct
HAAGFSG

SEQ ID NO: 10938 - protein, 7 aa, synthetic construct
WGARNAG

SEQ ID NO: 10939 - protein, 7 aa, synthetic construct
ESHRAIQ

SEQ ID NO: 10940 - protein, 7 aa, synthetic construct
YSLGPGS

SEQ ID NO: 10941 - protein, 7 aa, synthetic construct
DLRSSVP

SEQ ID NO: 10942 - protein, 7 aa, synthetic construct
TPRDARF

SEQ ID NO: 10943 - protein, 7 aa, synthetic construct
HSRLTSS

SEQ ID NO: 10944 - protein, 7 aa, synthetic construct
YTPLHPQ

SEQ ID NO: 10945 - protein, 7 aa, synthetic construct
LDVSWKG

SEQ ID NO: 10946 - protein, 7 aa, synthetic construct
VSTHLNV

SEQ ID NO: 10947 - protein, 7 aa, synthetic construct
RAVQGSV

SEQ ID NO: 10948 - protein, 7 aa, synthetic construct
QGSSSLS

SEQ ID NO: 10949 - protein, 7 aa, synthetic construct
GLQFPSA

SEQ ID NO: 10950 - protein, 7 aa, synthetic construct
PNGSGSG

SEQ ID NO: 10951 - protein, 7 aa, synthetic construct
YVRSVDL

SEQ ID NO: 10952 - protein, 7 aa, synthetic construct
VVSGVAV

SEQ ID NO: 10953 - protein, 7 aa, synthetic construct
SLSGANT

SEQ ID NO: 10954 - protein, 7 aa, synthetic construct
MKSTTYS

SEQ ID NO: 10955 - protein, 7 aa, synthetic construct
HSSHYPA

SEQ ID NO: 10956 - protein, 7 aa, synthetic construct
NNSVHSA

SEQ ID NO: 10957 - protein, 7 aa, synthetic construct
ARPSSGA

SEQ ID NO: 10958 - protein, 7 aa, synthetic construct
AGKPPQS

SEQ ID NO: 10959 - protein, 7 aa, synthetic construct
TGPSGGR

SEQ ID NO: 10960 - protein, 7 aa, synthetic construct
MARDNNT

SEQ ID NO: 10961 - protein, 7 aa, synthetic construct
SGRAMDS

SEQ ID NO: 10962 - protein, 7 aa, synthetic construct
VLGTSVL

SEQ ID NO: 10963 - protein, 7 aa, synthetic construct
PVYGKSA

SEQ ID NO: 10964 - protein, 7 aa, synthetic construct
YMSRAMA

SEQ ID NO: 10965 - protein, 7 aa, synthetic construct
WRAATGG

SEQ ID NO: 10966 - protein, 7 aa, synthetic construct
IGGTPLS

SEQ ID NO: 10967 - protein, 7 aa, synthetic construct
LNTATSA

SEQ ID NO: 10968 - protein, 7 aa, synthetic construct
RTTDSRQ

SEQ ID NO: 10969 - protein, 7 aa, synthetic construct
GVSQPLR

SEQ ID NO: 10970 - protein, 7 aa, synthetic construct
RMAGGGP

SEQ ID NO: 10971 - protein, 7 aa, synthetic construct
SASPTNR

SEQ ID NO: 10972 - protein, 7 aa, synthetic construct
TSTSTAW

SEQ ID NO: 10973 - protein, 7 aa, synthetic construct
SNGQRGV

SEQ ID NO: 10974 - protein, 7 aa, synthetic construct
PSSHYPA

SEQ ID NO: 10975 - protein, 7 aa, synthetic construct
RMPQSTA

SEQ ID NO: 10976 - protein, 7 aa, synthetic construct
REQTRLP

SEQ ID NO: 10977 - protein, 7 aa, synthetic construct
WRVNVEG

SEQ ID NO: 10978 - protein, 7 aa, synthetic construct
LSRGEGA

SEQ ID NO: 10979 - protein, 7 aa, synthetic construct
LAAVNSR

SEQ ID NO: 10980 - protein, 7 aa, synthetic construct
SSRGVPA

SEQ ID NO: 10981 - protein, 7 aa, synthetic construct
ATSSMRD

SEQ ID NO: 10982 - protein, 7 aa, synthetic construct
VVKGLLM

SEQ ID NO: 10983 - protein, 7 aa, synthetic construct
SETLMRP

SEQ ID NO: 10984 - protein, 7 aa, synthetic construct
NGHMKMV

SEQ ID NO: 10985 - protein, 7 aa, synthetic construct
WRGGTVS

SEQ ID NO: 10986 - protein, 7 aa, synthetic construct
GEGMLRQ

SEQ ID NO: 10987 - protein, 7 aa, synthetic construct
AGYDRHS

SEQ ID NO: 10988 - protein, 7 aa, synthetic construct
PSGKGGS

SEQ ID NO: 10989 - protein, 7 aa, synthetic construct
YGVSSKA

SEQ ID NO: 10990 - protein, 7 aa, synthetic construct
SRTGEAS

SEQ ID NO: 10991 - protein, 7 aa, synthetic construct
YSVGPGT

SEQ ID NO: 10992 - protein, 7 aa, synthetic construct
FSTAATS

SEQ ID NO: 10993 - protein, 7 aa, synthetic construct
VRSGGTL

SEQ ID NO: 10994 - protein, 7 aa, synthetic construct
AVSGSYA

SEQ ID NO: 10995 - protein, 7 aa, synthetic construct
NFAKGAL

SEQ ID NO: 10996 - protein, 7 aa, synthetic construct
GFQNGTT

SEQ ID NO: 10997 - protein, 7 aa, synthetic construct
LNSRLPL

SEQ ID NO: 10998 - protein, 7 aa, synthetic construct
GNSGNTR

SEQ ID NO: 10999 - protein, 7 aa, synthetic construct
ISQPGGR

SEQ ID NO: 11000 - protein, 7 aa, synthetic construct
NSLSKSG

SEQ ID NO: 11001 - DNA, 21 bp, synthetic construct
  source 1..21: mol_type = other DNA
aagcgtggggatgatagtatg

SEQ ID NO: 11002 - RNA, 21 nt, synthetic construct
  source 1..21: mol_type = other RNA
  ncRNA 1..21: ncRNA_class = other; note = mRNA
actcgtgttgctgatacggtg

SEQ ID NO: 11003 - DNA, 21 bp, synthetic construct
  source 1..21: mol_type = other DNA
gtgcgtggggattatgtttct

SEQ ID NO: 11004 - DNA, 21 bp, synthetic construct
  source 1..21: mol_type = other DNA
ggacgaggcgaccacggagta

SEQ ID NO: 11005 - DNA, 21 bp, synthetic construct
  source 1..21: mol_type = other DNA
gttcgtggagacatgacaaca

SEQ ID NO: 11006 - RNA, 21 nt, synthetic construct
  source 1..21: mol_type = other RNA
  ncRNA 1..21: ncRNA_class = other; note = mRNA
acgcgagcagcagacacagaa

SEQ ID NO: 11007 - DNA, 21 bp, synthetic construct
  source 1..21: mol_type = other DNA
ctgaggggtgatctgggtgtg

SEQ ID NO: 11008 - DNA, 21 bp, synthetic construct
  source 1..21: mol_type = other DNA
ggtcggggtgataatatgact

SEQ ID NO: 11009 - DNA, 21 bp, synthetic construct
  source 1..21: mol_type = other DNA
agtaggggggatgctgctatt

SEQ ID NO: 11010 - DNA, 21 bp, synthetic construct
  source 1..21: mol_type = other DNA
aatcgtggggatgcgattatt

SEQ ID NO: 11011 - RNA, 21 nt, synthetic construct
  source 1..21: mol_type = other RNA
  ncRNA 1..21: ncRNA_class = other; note = mRNA
actcgtgttgctgatacggag

SEQ ID NO: 11012 - DNA, 21 bp, synthetic construct
  source 1..21: mol_type = other DNA
gaacggggcgactacagatcc

SEQ ID NO: 11013 - DNA, 21 bp, synthetic construct
  source 1..21: mol_type = other DNA
agtcggcatacggatactatt

SEQ ID NO: 11014 - DNA, 21 bp, synthetic construct
  source 1..21: mol_type = other DNA
ataaggggtgacctacccgtt

SEQ ID NO: 11015 - RNA, 21 nt, synthetic construct
  source 1..21: mol_type = other RNA
  ncRNA 1..21: ncRNA_class = other; note = mRNA
acgagggtagcggacatggaa

SEQ ID NO: 11016 - RNA, 21 nt, synthetic construct
  source 1..21: mol_type = other RNA
  ncRNA 1..21: ncRNA_class = other; note = mRNA
acaagagtcgcggactcagaa

SEQ ID NO: 11017 - DNA, 21 bp, synthetic construct
  source 1..21: mol_type = other DNA
cttaagagggaggatgttatt

SEQ ID NO: 11018 - DNA, 21 bp, synthetic construct
  source 1..21: mol_type = other DNA
aggcggggggatgatgataat

SEQ ID NO: 11019 - DNA, 21 bp, synthetic construct
  source 1..21: mol_type = other DNA
caacgaggagacgggggatcc

SEQ ID NO: 11020 - DNA, 21 bp, synthetic construct
  source 1..21: mol_type = other DNA
gcccgaggcgacaacagaacc

SEQ ID NO: 11021 - DNA, 21 bp, synthetic construct
  source 1..21: mol_type = other DNA
ggaaggggggacgaaaacata

SEQ ID NO: 11022 - DNA, 21 bp, synthetic construct
  source 1..21: mol_type = other DNA
tccaggggggacggcaaagca

SEQ ID NO: 11023 - DNA, 21 bp, synthetic construct
  source 1..21: mol_type = other DNA
gggcgggggggggatcgtgtg

SEQ ID NO: 11024 - DNA, 21 bp, synthetic construct
  source 1..21: mol_type = other DNA
gaacgaggtgacatgggccgc

SEQ ID NO: 11025 - DNA, 21 bp, synthetic construct
  source 1..21: mol_type = other DNA
ccccgtggcgacgtagtgggc

SEQ ID NO: 11026 - DNA, 21 bp, synthetic construct
  source 1..21: mol_type = other DNA
gatgggcggcgtgattcggtt

SEQ ID NO: 11027 - DNA, 21 bp, synthetic construct
  source 1..21: mol_type = other DNA
aatgagcggggttttagtggt

SEQ ID NO: 11028 - DNA, 21 bp, synthetic construct
  source 1..21: mol_type = other DNA
gcgcgtggtgatgggggtcat

SEQ ID NO: 11029 - DNA, 21 bp, synthetic construct
  source 1..21: mol_type = other DNA
ggtcgcggcgacggtacagcc

SEQ ID NO: 11030 - DNA, 21 bp, synthetic construct
  source 1..21: mol_type = other DNA
gagaggggtgataataatcct

SEQ ID NO: 11031 - DNA, 21 bp, synthetic construct
  source 1..21: mol_type = other DNA
gttcggggtgatgttggttct

SEQ ID NO: 11032 - DNA, 21 bp, synthetic construct
  source 1..21: mol_type = other DNA
ctgcgttcggcggatatgacg

SEQ ID NO: 11033 - DNA, 21 bp, synthetic construct
  source 1..21: mol_type = other DNA
ggccgcggggacgcagctctc

SEQ ID NO: 11034 - DNA, 21 bp, synthetic construct
  source 1..21: mol_type = other DNA
cgtgagcgtgctgatgggcat

SEQ ID NO: 11035 - DNA, 21 bp, synthetic construct
  source 1..21: mol_type = other DNA
ccgaagggtgatgatggggct

SEQ ID NO: 11036 - DNA, 21 bp, synthetic construct
  source 1..21: mol_type = other DNA
cttcgaggggacggtagccct

SEQ ID NO: 11037 - DNA, 21 bp, synthetic construct
  source 1..21: mol_type = other DNA
aggggggatctgggtagtcat

SEQ ID NO: 11038 - DNA, 21 bp, synthetic construct
  source 1..21: mol_type = other DNA
cagaggggtgattctactttg

SEQ ID NO: 11039 - DNA, 21 bp, synthetic construct
  source 1..21: mol_type = other DNA
gagaggggtgataataatcat

SEQ ID NO: 11040 - DNA, 21 bp, synthetic construct
  source 1..21: mol_type = other DNA
ggtcgtggtgatgtgacgtct

SEQ ID NO: 11041 - DNA, 21 bp, synthetic construct
  source 1..21: mol_type = other DNA
cggggtgacgtggacacctct

SEQ ID NO: 11042 - DNA, 21 bp, synthetic construct
  source 1..21: mol_type = other DNA
ggtcggggtgataatttgact

SEQ ID NO: 11043 - DNA, 21 bp, synthetic construct
  source 1..21: mol_type = other DNA
tccatgcctcgcacttcggac

SEQ ID NO: 11044 - DNA, 21 bp, synthetic construct
  source 1..21: mol_type = other DNA
acgcgtggtgatgatcatagt

SEQ ID NO: 11045 - DNA, 21 bp, synthetic construct
  source 1..21: mol_type = other DNA
gtgatgcctaggactgttatg

SEQ ID NO: 11046 - DNA, 21 bp, synthetic construct
  source 1..21: mol_type = other DNA
atgatgcctaggagtgcgatg

SEQ ID NO: 11047 - DNA, 21 bp, synthetic construct
  source 1..21: mol_type = other DNA
ctgaggggtgataatcatggg

SEQ ID NO: 11048 - DNA, 21 bp, synthetic construct
  source 1..21: mol_type = other DNA
cgtggggattcggtggggccg

SEQ ID NO: 11049 - DNA, 21 bp, synthetic construct
  source 1..21: mol_type = other DNA
acgaggggggatggtgagtgt

SEQ ID NO: 11050 - DNA, 21 bp, synthetic construct
  source 1..21: mol_type = other DNA
ttgaggggggatcttagtcct

SEQ ID NO: 11051 - DNA, 21 bp, synthetic construct
  source 1..21: mol_type = other DNA
gtccgaggcgactacggtgcc

SEQ ID NO: 11052 - DNA, 21 bp, synthetic construct
  source 1..21: mol_type = other DNA
atgcgaggggacaacggctta

SEQ ID NO: 11053 - RNA, 21 nt, synthetic construct
  source 1..21: mol_type = other RNA
  ncRNA 1..21: ncRNA_class = other; note = mRNA
agtttaggttccaacgccagc

SEQ ID NO: 11054 - RNA, 21 nt, synthetic construct
  source 1..21: mol_type = other RNA
  ncRNA 1..21: ncRNA_class = other; note = mRNA
ctcaggtctgacagcgtacga

SEQ ID NO: 11055 - DNA, 21 bp, synthetic construct
  source 1..21: mol_type = other DNA
gttaacgacagagccgtacac

SEQ ID NO: 11056 - RNA, 21 nt, synthetic construct
  source 1..21: mol_type = other RNA
  ncRNA 1..21: ncRNA_class = other; note = mRNA
gcgattgctaatagtcctatt

SEQ ID NO: 11057 - DNA, 21 bp, synthetic construct
  source 1..21: mol_type = other DNA
gacggccgaagggacactgtc

SEQ ID NO: 11058 - DNA, 21 bp, synthetic construct
  source 1..21: mol_type = other DNA
cctgctcgtggtgatgctatt

SEQ ID NO: 11059 - DNA, 21 bp, synthetic construct
  source 1..21: mol_type = other DNA
gtgagaggagacgtcatcaca

SEQ ID NO: 11060 - DNA, 21 bp, synthetic construct
  source 1..21: mol_type = other DNA
gtcggcgcaagtggagcgtcc

SEQ ID NO: 11061 - DNA, 21 bp, synthetic construct
  source 1..21: mol_type = other DNA
gtggctagggagatggggagt

SEQ ID NO: 11062 - DNA, 21 bp, synthetic construct
  source 1..21: mol_type = other DNA
cttcacgaaaaacaagtgcgt

SEQ ID NO: 11063 - DNA, 21 bp, synthetic construct
  source 1..21: mol_type = other DNA
ctgggctcacgcgtacaatct

SEQ ID NO: 11064 - DNA, 21 bp, synthetic construct
  source 1..21: mol_type = other DNA
ggtgggcatggtatgtcgact

SEQ ID NO: 11065 - DNA, 21 bp, synthetic construct
  source 1..21: mol_type = other DNA
tctgatggtttgcagagggct

SEQ ID NO: 11066 - DNA, 21 bp, synthetic construct
  source 1..21: mol_type = other DNA
gttggtgctgttcgtactcct

SEQ ID NO: 11067 - RNA, 21 nt, synthetic construct
  source 1..21: mol_type = other RNA
  ncRNA 1..21: ncRNA_class = other; note = mRNA
ttgtcttctcgtcttattgcg

SEQ ID NO: 11068 - RNA, 21 nt, synthetic construct
  source 1..21: mol_type = other RNA
  ncRNA 1..21: ncRNA_class = other; note = mRNA
gatcgtgcgggggggactgag

SEQ ID NO: 11069 - RNA, 21 nt, synthetic construct
  source 1..21: mol_type = other RNA
  ncRNA 1..21: ncRNA_class = other; note = mRNA
tggccaggtagcaacgcctca

SEQ ID NO: 11070 - DNA, 21 bp, synthetic construct
  source 1..21: mol_type = other DNA
gctaagagtgatcttggggtg

SEQ ID NO: 11071 - RNA, 21 nt, synthetic construct
  source 1..21: mol_type = other RNA
  ncRNA 1..21: ncRNA_class = other; note = mRNA
tctaatactcaggctcctatg

SEQ ID NO: 11072 - RNA, 21 nt, synthetic construct
  source 1..21: mol_type = other RNA
  ncRNA 1..21: ncRNA_class = other; note = mRNA
acggttgagattgttcgtggg

SEQ ID NO: 11073 - DNA, 21 bp, synthetic construct
  source 1..21: mol_type = other DNA
gttcgtggtggtgatggggtt

SEQ ID NO: 11074 - DNA, 21 bp, synthetic construct
  source 1..21: mol_type = other DNA
tctagttcggttaacgaccgg

SEQ ID NO: 11075 - DNA, 21 bp, synthetic construct
  source 1..21: mol_type = other DNA
ataggtagcgtcacgcactcc

SEQ ID NO: 11076 - RNA, 21 nt, synthetic construct
  source 1..21: mol_type = other RNA
  ncRNA 1..21: ncRNA_class = other; note = mRNA
gggagggcgactgattatacg

SEQ ID NO: 11077 - DNA, 21 bp, synthetic construct
  source 1..21: mol_type = other DNA
acaagaggagacaacgcggac

SEQ ID NO: 11078 - DNA, 21 bp, synthetic construct
  source 1..21: mol_type = other DNA
gtccgtggagacgacagcata

SEQ ID NO: 11079 - DNA, 21 bp, synthetic construct
  source 1..21: mol_type = other DNA
gagttgaggactagtgagagg

SEQ ID NO: 11080 - DNA, 21 bp, synthetic construct
  source 1..21: mol_type = other DNA
aagcaggagtatagtactgcg

SEQ ID NO: 11081 - DNA, 21 bp, synthetic construct
  source 1..21: mol_type = other DNA
agaagcaacgactctcacctc

SEQ ID NO: 11082 - DNA, 21 bp, synthetic construct
  source 1..21: mol_type = other DNA
caacttaaaggtaacgcagac

SEQ ID NO: 11083 - RNA, 21 nt, synthetic construct
  source 1..21: mol_type = other RNA
  ncRNA 1..21: ncRNA_class = other; note = mRNA
ggttcgcggagtgagactaat

SEQ ID NO: 11084 - DNA, 21 bp, synthetic construct
  source 1..21: mol_type = other DNA
tccaacaacttgcctctcccg

SEQ ID NO: 11085 - DNA, 21 bp, synthetic construct
  source 1..21: mol_type = other DNA
ctgagaggggacctcaaagcg

SEQ ID NO: 11086 - DNA, 21 bp, synthetic construct
  source 1..21: mol_type = other DNA
gaagggcggttcctcgacgcg

SEQ ID NO: 11087 - DNA, 21 bp, synthetic construct
  source 1..21: mol_type = other DNA
agggttacgactgcgctggcg

SEQ ID NO: 11088 - DNA, 21 bp, synthetic construct
  source 1..21: mol_type = other DNA
agtgatgggcggctggcggtt

SEQ ID NO: 11089 - RNA, 21 nt, synthetic construct
  source 1..21: mol_type = other RNA
  ncRNA 1..21: ncRNA_class = other; note = mRNA
gctattgctaatagttctatt

SEQ ID NO: 11090 - DNA, 21 bp, synthetic construct
  source 1..21: mol_type = other DNA
cggcataatgggaatgatggt

SEQ ID NO: 11091 - RNA, 21 nt, synthetic construct
  source 1..21: mol_type = other RNA
  ncRNA 1..21: ncRNA_class = other; note = mRNA
agtcgcgtggccgacaccgaa

SEQ ID NO: 11092 - DNA, 21 bp, synthetic construct
  source 1..21: mol_type = other DNA
atgcgttctgctgagatgatg

SEQ ID NO: 11093 - DNA, 21 bp, synthetic construct
  source 1..21: mol_type = other DNA
gagaggggtgataataatact

SEQ ID NO: 11094 - RNA, 21 nt, synthetic construct
  source 1..21: mol_type = other RNA
  ncRNA 1..21: ncRNA_class = other; note = mRNA
ggaagagcaagtgacaacacc

SEQ ID NO: 11095 - RNA, 21 nt, synthetic construct
  source 1..21: mol_type = other RNA
  ncRNA 1..21: ncRNA_class = other; note = mRNA
acgtctttgtcttctgttgct

SEQ ID NO: 11096 - RNA, 21 nt, synthetic construct
  source 1..21: mol_type = other RNA
  ncRNA 1..21: ncRNA_class = other; note = mRNA
atcggcggcgtaatgtctctc

SEQ ID NO: 11097 - RNA, 21 nt, synthetic construct
  source 1..21: mol_type = other RNA
  ncRNA 1..21: ncRNA_class = other; note = mRNA
caggctgagacgcgtggtgtt

SEQ ID NO: 11098 - DNA, 21 bp, synthetic construct
  source 1..21: mol_type = other DNA
ttcgtcatacaacaatcgggc

SEQ ID NO: 11099 - DNA, 21 bp, synthetic construct
  source 1..21: mol_type = other DNA
acgggtacgtctctggttatt

SEQ ID NO: 11100 - DNA, 21 bp, synthetic construct
  source 1..21: mol_type = other DNA
ttcaccggcgtaggggtagtc

SEQ ID NO: 11101 - DNA, 21 bp, synthetic construct
  source 1..21: mol_type = other DNA
atgaccacaggtgtaagtgcc

SEQ ID NO: 11102 - DNA, 21 bp, synthetic construct
  source 1..21: mol_type = other DNA
ctgaagggtgatacttcttct

SEQ ID NO: 11103 - DNA, 21 bp, synthetic construct
  source 1..21: mol_type = other DNA
ggtcggcaggatactactacg

SEQ ID NO: 11104 - DNA, 21 bp, synthetic construct
  source 1..21: mol_type = other DNA
tactcggttggacccggttca

SEQ ID NO: 11105 - DNA, 21 bp, synthetic construct
  source 1..21: mol_type = other DNA
tcgggtgggacgatgagtacg

SEQ ID NO: 11106 - DNA, 21 bp, synthetic construct
  source 1..21: mol_type = other DNA
gcagtcaccacgcaaccaagg

SEQ ID NO: 11107 - RNA, 21 nt, synthetic construct
  source 1..21: mol_type = other RNA
  ncRNA 1..21: ncRNA_class = other; note = mRNA
cgggtgttggggatggataat

SEQ ID NO: 11108 - DNA, 21 bp, synthetic construct
  source 1..21: mol_type = other DNA
cgtggtgattctcctgctgct

SEQ ID NO: 11109 - DNA, 21 bp, synthetic construct
  source 1..21: mol_type = other DNA
cctagtagtcatcatcctgcg

SEQ ID NO: 11110 - RNA, 21 nt, synthetic construct
  source 1..21: mol_type = other RNA
  ncRNA 1..21: ncRNA_class = other; note = mRNA
agggaacggctagacaccaca

SEQ ID NO: 11111 - DNA, 21 bp, synthetic construct
  source 1..21: mol_type = other DNA
catggtgctttgtctaatgtt

SEQ ID NO: 11112 - DNA, 21 bp, synthetic construct
  source 1..21: mol_type = other DNA
gagtatcctcgtgggccttct

SEQ ID NO: 11113 - DNA, 21 bp, synthetic construct
  source 1..21: mol_type = other DNA
gtccggggcgacgaaaactgg

SEQ ID NO: 11114 - DNA, 21 bp, synthetic construct
  source 1..21: mol_type = other DNA
cgaggggacagtggaagtttc

SEQ ID NO: 11115 - DNA, 21 bp, synthetic construct
  source 1..21: mol_type = other DNA
acgggcagcgcagtgatgata

SEQ ID NO: 11116 - DNA, 21 bp, synthetic construct
  source 1..21: mol_type = other DNA
gtatcaaacagtggaggcctg

SEQ ID NO: 11117 - DNA, 21 bp, synthetic construct
  source 1..21: mol_type = other DNA
tcgtcgcatgtgggtgggctg

SEQ ID NO: 11118 - DNA, 21 bp, synthetic construct
  source 1..21: mol_type = other DNA
gttgggcatgggggtgatcgt

SEQ ID NO: 11119 - RNA, 21 nt, synthetic construct
  source 1..21: mol_type = other RNA
  ncRNA 1..21: ncRNA_class = other; note = mRNA
gcagtgaacgccgttactggc

SEQ ID NO: 11120 - DNA, 21 bp, synthetic construct
  source 1..21: mol_type = other DNA
taccggggggacggcgaaata

SEQ ID NO: 11121 - DNA, 21 bp, synthetic construct
  source 1..21: mol_type = other DNA
ggtgttacgtctcagcctctt

SEQ ID NO: 11122 - DNA, 21 bp, synthetic construct
  source 1..21: mol_type = other DNA
aatctgcagagtctgactctg

SEQ ID NO: 11123 - RNA, 21 nt, synthetic construct
  source 1..21: mol_type = other RNA
  ncRNA 1..21: ncRNA_class = other; note = mRNA
tattcgcctcttcatccgcag

SEQ ID NO: 11124 - DNA, 21 bp, synthetic construct
  source 1..21: mol_type = other DNA
tacgtcaggaccgtagacctc

SEQ ID NO: 11125 - RNA, 21 nt, synthetic construct
  source 1..21: mol_type = other RNA
  ncRNA 1..21: ncRNA_class = other; note = mRNA
cttgattctgggaagagtacg

SEQ ID NO: 11126 - DNA, 21 bp, synthetic construct
  source 1..21: mol_type = other DNA
ggtgttaagacgtcggagttg

SEQ ID NO: 11127 - RNA, 21 nt, synthetic construct
  source 1..21: mol_type = other RNA
  ncRNA 1..21: ncRNA_class = other; note = mRNA
atcggaggggtaaaatctctg

SEQ ID NO: 11128 - RNA, 21 nt, synthetic construct
  source 1..21: mol_type = other RNA
  ncRNA 1..21: ncRNA_class = other; note = mRNA
caggagactgggaagttgctt

SEQ ID NO: 11129 - DNA, 21 bp, synthetic construct
  source 1..21: mol_type = other DNA
gcgaatcagtatccgactggg

SEQ ID NO: 11130 - DNA, 21 bp, synthetic construct
  source 1..21: mol_type = other DNA
gacagagtctcagttatagca

SEQ ID NO: 11131 - DNA, 21 bp, synthetic construct
  source 1..21: mol_type = other DNA
catggttcgccgggtgcttat

SEQ ID NO: 11132 - DNA, 21 bp, synthetic construct
  source 1..21: mol_type = other DNA
gacaggggagacagtgccaca

SEQ ID NO: 11133 - DNA, 21 bp, synthetic construct
  source 1..21: mol_type = other DNA
atagcacttagcgtcaactcg

SEQ ID NO: 11134 - RNA, 21 nt, synthetic construct
  source 1..21: mol_type = other RNA
  ncRNA 1..21: ncRNA_class = other; note = mRNA
acgagggtagcggacaccggc

SEQ ID NO: 11135 - DNA, 21 bp, synthetic construct
  source 1..21: mol_type = other DNA
gatactacgaggcttgtgggt

SEQ ID NO: 11136 - DNA, 21 bp, synthetic construct
  source 1..21: mol_type = other DNA
ggagtcatcaaaagcatctcg

SEQ ID NO: 11137 - DNA, 21 bp, synthetic construct
  source 1..21: mol_type = other DNA
gtcgccgttctacggggtgga

SEQ ID NO: 11138 - DNA, 21 bp, synthetic construct
  source 1..21: mol_type = other DNA
gggaagactggggtgcctttt

SEQ ID NO: 11139 - DNA, 21 bp, synthetic construct
  source 1..21: mol_type = other DNA
tttgctgcggggggtgtgttg

SEQ ID NO: 11140 - DNA, 21 bp, synthetic construct
  source 1..21: mol_type = other DNA
agtatggtttctcagcgtatg

SEQ ID NO: 11141 - DNA, 21 bp, synthetic construct
  source 1..21: mol_type = other DNA
ctgcggccgtcggctgatgtg

SEQ ID NO: 11142 - DNA, 21 bp, synthetic construct
  source 1..21: mol_type = other DNA
atatctgaccgagcagcggta

SEQ ID NO: 11143 - DNA, 21 bp, synthetic construct
  source 1..21: mol_type = other DNA
tctgagattggtcggattacg

SEQ ID NO: 11144 - DNA, 21 bp, synthetic construct
  source 1..21: mol_type = other DNA
cactcgggcggcatggtagtc

SEQ ID NO: 11145 - DNA, 21 bp, synthetic construct
  source 1..21: mol_type = other DNA
tttgtgtctaatgctggggtg

SEQ ID NO: 11146 - DNA, 21 bp, synthetic construct
  source 1..21: mol_type = other DNA
gtcatcggctctgggacggca

SEQ ID NO: 11147 - DNA, 21 bp, synthetic construct
  source 1..21: mol_type = other DNA
ggggaaaggtacaacgacact

SEQ ID NO: 11148 - DNA, 21 bp, synthetic construct
  source 1..21: mol_type = other DNA
ctacctcggggtggtgtcctc

SEQ ID NO: 11149 - DNA, 21 bp, synthetic construct
  source 1..21: mol_type = other DNA
ggatcgcgggaaggattccgg

SEQ ID NO: 11150 - RNA, 21 nt, synthetic construct
  source 1..21: mol_type = other RNA
  ncRNA 1..21: ncRNA_class = other; note = mRNA
agtggggctcgggattcgatg

SEQ ID NO: 11151 - RNA, 21 nt, synthetic construct
  source 1..21: mol_type = other RNA
  ncRNA 1..21: ncRNA_class = other; note = mRNA
agaagtgtaggcccaacaagc

SEQ ID NO: 11152 - DNA, 21 bp, synthetic construct
  source 1..21: mol_type = other DNA
caacgacaagcagaccttgta

SEQ ID NO: 11153 - DNA, 21 bp, synthetic construct
  source 1..21: mol_type = other DNA
gtccggacagacggcccacga

SEQ ID NO: 11154 - DNA, 21 bp, synthetic construct
  source 1..21: mol_type = other DNA
gcgccgatgtcgactaatcgt

SEQ ID NO: 11155 - DNA, 21 bp, synthetic construct
  source 1..21: mol_type = other DNA
acccccggacgctcaggcaac

SEQ ID NO: 11156 - RNA, 21 nt, synthetic construct
  source 1..21: mol_type = other RNA
  ncRNA 1..21: ncRNA_class = other; note = mRNA
cgagtcctgggtatggaaaac

SEQ ID NO: 11157 - DNA, 21 bp, synthetic construct
  source 1..21: mol_type = other DNA
tctcctaaggataaggatgct

SEQ ID NO: 11158 - DNA, 21 bp, synthetic construct
  source 1..21: mol_type = other DNA
gtggcgttggcggttaggggg

SEQ ID NO: 11159 - DNA, 21 bp, synthetic construct
  source 1..21: mol_type = other DNA
atgcggggctctaacttctcg

SEQ ID NO: 11160 - DNA, 21 bp, synthetic construct
  source 1..21: mol_type = other DNA
agtggtggtacgagtttttct

SEQ ID NO: 11161 - DNA, 21 bp, synthetic construct
  source 1..21: mol_type = other DNA
gtcgtaaacaacacatcttgg

SEQ ID NO: 11162 - RNA, 21 nt, synthetic construct
  source 1..21: mol_type = other RNA
  ncRNA 1..21: ncRNA_class = other; note = mRNA
tctgctacgaggatgccttcg

SEQ ID NO: 11163 - RNA, 21 nt, synthetic construct
  source 1..21: mol_type = other RNA
  ncRNA 1..21: ncRNA_class = other; note = mRNA
tttcaggttgtgggtccgtcg

SEQ ID NO: 11164 - DNA, 21 bp, synthetic construct
  source 1..21: mol_type = other DNA
agggatcaggctgtggtgggg

SEQ ID NO: 11165 - DNA, 21 bp, synthetic construct
  source 1..21: mol_type = other DNA
gctagtgggacgggtgggtat

SEQ ID NO: 11166 - DNA, 21 bp, synthetic construct
  source 1..21: mol_type = other DNA
aaattcaacgacggtggtggc

SEQ ID NO: 11167 - DNA, 21 bp, synthetic construct
  source 1..21: mol_type = other DNA
ctgttggatgtgagtcagcgt

SEQ ID NO: 11168 - DNA, 21 bp, synthetic construct
  source 1..21: mol_type = other DNA
ggggtcgggctttccatgctg

SEQ ID NO: 11169 - DNA, 21 bp, synthetic construct
  source 1..21: mol_type = other DNA
ggagccggtgtcggattgagc

SEQ ID NO: 11170 - DNA, 21 bp, synthetic construct
  source 1..21: mol_type = other DNA
catcctactcatgggcttgtt

SEQ ID NO: 11171 - RNA, 21 nt, synthetic construct
  source 1..21: mol_type = other RNA
  ncRNA 1..21: ncRNA_class = other; note = mRNA
cacagcggtctctcttctagt

SEQ ID NO: 11172 - DNA, 21 bp, synthetic construct
  source 1..21: mol_type = other DNA
tacctggacatcactgccgtc

SEQ ID NO: 11173 - DNA, 21 bp, synthetic construct
  source 1..21: mol_type = other DNA
gatcgggcgtcgattagtgcg

SEQ ID NO: 11174 - DNA, 21 bp, synthetic construct
  source 1..21: mol_type = other DNA
atgatgaacggggcgggacgg

SEQ ID NO: 11175 - RNA, 21 nt, synthetic construct
  source 1..21: mol_type = other RNA
  ncRNA 1..21: ncRNA_class = other; note = mRNA
ggacgggcaactgacaacact

SEQ ID NO: 11176 - DNA, 21 bp, synthetic construct
  source 1..21: mol_type = other DNA
gaagcacgaggcgacgacgac

SEQ ID NO: 11177 - RNA, 21 nt, synthetic construct
  source 1..21: mol_type = other RNA
  ncRNA 1..21: ncRNA_class = other; note = mRNA
gcggttaatgctgtgccgcgt

SEQ ID NO: 11178 - DNA, 21 bp, synthetic construct
  source 1..21: mol_type = other DNA
gttggtgctctttataatagt

SEQ ID NO: 11179 - DNA, 21 bp, synthetic construct
  source 1..21: mol_type = other DNA
attggtacttcgggtgctgtg

SEQ ID NO: 11180 - DNA, 21 bp, synthetic construct
  source 1..21: mol_type = other DNA
gctaaggggtcgctgtttgag

SEQ ID NO: 11181 - DNA, 21 bp, synthetic construct
  source 1..21: mol_type = other DNA
actcagagtgcgcttaatgtt

SEQ ID NO: 11182 - DNA, 21 bp, synthetic construct
  source 1..21: mol_type = other DNA
tctatggcggagtcgaggccg

SEQ ID NO: 11183 - DNA, 21 bp, synthetic construct
  source 1..21: mol_type = other DNA
ggacgattctcttcggacaac

SEQ ID NO: 11184 - DNA, 21 bp, synthetic construct
  source 1..21: mol_type = other DNA
gcgattttgtctgtgtcgggt

SEQ ID NO: 11185 - RNA, 21 nt, synthetic construct
  source 1..21: mol_type = other RNA
  ncRNA 1..21: ncRNA_class = other; note = mRNA
tacatggacacccgttccatg

SEQ ID NO: 11186 - DNA, 21 bp, synthetic construct
  source 1..21: mol_type = other DNA
agccacgctgtcggaacagtc

SEQ ID NO: 11187 - DNA, 21 bp, synthetic construct
  source 1..21: mol_type = other DNA
ctgatgaatgagcgtgctggt

SEQ ID NO: 11188 - RNA, 21 nt, synthetic construct
  source 1..21: mol_type = other RNA
  ncRNA 1..21: ncRNA_class = other; note = mRNA
gttaccggcaactcaacctac

SEQ ID NO: 11189 - DNA, 21 bp, synthetic construct
  source 1..21: mol_type = other DNA
gatcgtcgtgcggatgctgct

SEQ ID NO: 11190 - DNA, 21 bp, synthetic construct
  source 1..21: mol_type = other DNA
cagggtaagactcatgcgccg

SEQ ID NO: 11191 - DNA, 21 bp, synthetic construct
  source 1..21: mol_type = other DNA
gggtctagagaaggattatca

SEQ ID NO: 11192 - DNA, 21 bp, synthetic construct
  source 1..21: mol_type = other DNA
gtgttgggtttggctaattcg

SEQ ID NO: 11193 - DNA, 21 bp, synthetic construct
  source 1..21: mol_type = other DNA
acgaaggttgctgatattagt

SEQ ID NO: 11194 - DNA, 21 bp, synthetic construct
  source 1..21: mol_type = other DNA
gctcgtggtgatacgctttgt

SEQ ID NO: 11195 - DNA, 21 bp, synthetic construct
  source 1..21: mol_type = other DNA
gtgcctgagttggcgcgtaat

SEQ ID NO: 11196 - RNA, 21 nt, synthetic construct
  source 1..21: mol_type = other RNA
  ncRNA 1..21: ncRNA_class = other; note = mRNA
agcacagcgggcatgaccatc

SEQ ID NO: 11197 - DNA, 21 bp, synthetic construct
  source 1..21: mol_type = other DNA
atgggtacgaagtttctggat

SEQ ID NO: 11198 - RNA, 21 nt, synthetic construct
  source 1..21: mol_type = other RNA
  ncRNA 1..21: ncRNA_class = other; note = mRNA
accgcagaccgctaccaaatg

SEQ ID NO: 11199 - DNA, 21 bp, synthetic construct
  source 1..21: mol_type = other DNA
cgggtggctggttctgaggag

SEQ ID NO: 11200 - DNA, 21 bp, synthetic construct
  source 1..21: mol_type = other DNA
gtgagtgttggcctagcgccc

SEQ ID NO: 11201 - DNA, 21 bp, synthetic construct
  source 1..21: mol_type = other DNA
aaaggcggctacacgagcagc

SEQ ID NO: 11202 - DNA, 21 bp, synthetic construct
  source 1..21: mol_type = other DNA
gtgggtagggagatgggtagt

SEQ ID NO: 11203 - DNA, 21 bp, synthetic construct
  source 1..21: mol_type = other DNA
tacgacggcgtcgcccgctac

SEQ ID NO: 11204 - DNA, 21 bp, synthetic construct
  source 1..21: mol_type = other DNA
gtcgtgggaagtggcttactc

SEQ ID NO: 11205 - DNA, 21 bp, synthetic construct
  source 1..21: mol_type = other DNA
ctggcgaggggggagggtgct

SEQ ID NO: 11206 - DNA, 21 bp, synthetic construct
  source 1..21: mol_type = other DNA
agtggcacctcacacatcgac

SEQ ID NO: 11207 - DNA, 21 bp, synthetic construct
  source 1..21: mol_type = other DNA
gcggttcgggaggagcgtacg

SEQ ID NO: 11208 - DNA, 21 bp, synthetic construct
  source 1..21: mol_type = other DNA
ttcatggacactctattatcc

SEQ ID NO: 11209 - DNA, 21 bp, synthetic construct
  source 1..21: mol_type = other DNA
tttggtactccggctaatgct

SEQ ID NO: 11210 - DNA, 21 bp, synthetic construct
  source 1..21: mol_type = other DNA
caagccgaatcccgcggggtc

SEQ ID NO: 11211 - DNA, 21 bp, synthetic construct
  source 1..21: mol_type = other DNA
gacggtcaaccacgactctcc

SEQ ID NO: 11212 - DNA, 21 bp, synthetic construct
  source 1..21: mol_type = other DNA
atgggggatccgaggacgttg

SEQ ID NO: 11213 - DNA, 21 bp, synthetic construct
  source 1..21: mol_type = other DNA
ggtacttctaatgcgaatact

SEQ ID NO: 11214 - DNA, 21 bp, synthetic construct
  source 1..21: mol_type = other DNA
actgggagggtcggggtgaca

SEQ ID NO: 11215 - DNA, 21 bp, synthetic construct
  source 1..21: mol_type = other DNA
gggcgggctgatgcgattcag

SEQ ID NO: 11216 - DNA, 21 bp, synthetic construct
  source 1..21: mol_type = other DNA
tttcagaatacgagtagtgct

SEQ ID NO: 11217 - DNA, 21 bp, synthetic construct
  source 1..21: mol_type = other DNA
ttgaggggtgatgttgctggt

SEQ ID NO: 11218 - DNA, 21 bp, synthetic construct
  source 1..21: mol_type = other DNA
gttaatgcgaaggaggcttcg

SEQ ID NO: 11219 - DNA, 21 bp, synthetic construct
  source 1..21: mol_type = other DNA
tgggggcttagtactacgtcg

SEQ ID NO: 11220 - DNA, 21 bp, synthetic construct
  source 1..21: mol_type = other DNA
gtcaacgcttcaaacgaattc

SEQ ID NO: 11221 - DNA, 21 bp, synthetic construct
  source 1..21: mol_type = other DNA
gacttcaggggagaaaggccc

SEQ ID NO: 11222 - DNA, 21 bp, synthetic construct
  source 1..21: mol_type = other DNA
cgtgaacaaacaggattaagt

SEQ ID NO: 11223 - DNA, 21 bp, synthetic construct
  source 1..21: mol_type = other DNA
gtggggacgaagtttctggat

SEQ ID NO: 11224 - DNA, 21 bp, synthetic construct
  source 1..21: mol_type = other DNA
aataatggtacgttgctttct

SEQ ID NO: 11225 - DNA, 21 bp, synthetic construct
  source 1..21: mol_type = other DNA
cgtccggtgcagggtgagaat

SEQ ID NO: 11226 - DNA, 21 bp, synthetic construct
  source 1..21: mol_type = other DNA
gagaggggtgataatttgctt

SEQ ID NO: 11227 - DNA, 21 bp, synthetic construct
  source 1..21: mol_type = other DNA
acgctgggttcggctcatcag

SEQ ID NO: 11228 - DNA, 21 bp, synthetic construct
  source 1..21: mol_type = other DNA
agttcagtcgccactggcgcg

SEQ ID NO: 11229 - DNA, 21 bp, synthetic construct
  source 1..21: mol_type = other DNA
gtttacgtaactacaacagca

SEQ ID NO: 11230 - DNA, 21 bp, synthetic construct
  source 1..21: mol_type = other DNA
tctgggaaggatcgtaatgat

SEQ ID NO: 11231 - DNA, 21 bp, synthetic construct
  source 1..21: mol_type = other DNA
agtaatccgagtaggactccg

SEQ ID NO: 11232 - DNA, 21 bp, synthetic construct
  source 1..21: mol_type = other DNA
ttgagtcgggtgactgctgtg

SEQ ID NO: 11233 - DNA, 21 bp, synthetic construct
  source 1..21: mol_type = other DNA
cttgggtcggcgatgttgaat

SEQ ID NO: 11234 - DNA, 21 bp, synthetic construct
  source 1..21: mol_type = other DNA
ttgcgttctgctgagatgatg

SEQ ID NO: 11235 - DNA, 21 bp, synthetic construct
  source 1..21: mol_type = other DNA
gatgttacgtctcagcctcgt

SEQ ID NO: 11236 - DNA, 21 bp, synthetic construct
  source 1..21: mol_type = other DNA
agggggtctgtggtgctggcg

SEQ ID NO: 11237 - DNA, 21 bp, synthetic construct
  source 1..21: mol_type = other DNA
gctggtactacgcagagtcag

SEQ ID NO: 11238 - DNA, 21 bp, synthetic construct
  source 1..21: mol_type = other DNA
cagcgtactgaggcgtatacg

SEQ ID NO: 11239 - DNA, 21 bp, synthetic construct
  source 1..21: mol_type = other DNA
gcgaatgctaattcgacttct

SEQ ID NO: 11240 - RNA, 21 nt, synthetic construct
  source 1..21: mol_type = other RNA
  ncRNA 1..21: ncRNA_class = other; note = mRNA
gctgggcattatgggagtagt

SEQ ID NO: 11241 - DNA, 21 bp, synthetic construct
  source 1..21: mol_type = other DNA
aaccgcgcagactcctcgtac

SEQ ID NO: 11242 - RNA, 21 nt, synthetic construct
  source 1..21: mol_type = other RNA
  ncRNA 1..21: ncRNA_class = other; note = mRNA
tggggctcaggcagtgtcgca

SEQ ID NO: 11243 - DNA, 21 bp, synthetic construct
  source 1..21: mol_type = other DNA
gaaccgatcggaggacgagtg

SEQ ID NO: 11244 - DNA, 21 bp, synthetic construct
  source 1..21: mol_type = other DNA
gtattgtcggtcgcgaactcg

SEQ ID NO: 11245 - DNA, 21 bp, synthetic construct
  source 1..21: mol_type = other DNA
gccggcaacaaacaatcccaa

SEQ ID NO: 11246 - RNA, 21 nt, synthetic construct
  source 1..21: mol_type = other RNA
  ncRNA 1..21: ncRNA_class = other; note = mRNA
atcgggcacgaagccggcatg

SEQ ID NO: 11247 - DNA, 21 bp, synthetic construct
  source 1..21: mol_type = other DNA
tgggctactgctggtactggg

SEQ ID NO: 11248 - DNA, 21 bp, synthetic construct
  source 1..21: mol_type = other DNA
gtgctgggtctgagtcctaag

SEQ ID NO: 11249 - DNA, 21 bp, synthetic construct
  source 1..21: mol_type = other DNA
cgggaaggaaccgccagccca

SEQ ID NO: 11250 - DNA, 21 bp, synthetic construct
  source 1..21: mol_type = other DNA
tcaaccacggcgtccgccgtt

SEQ ID NO: 11251 - RNA, 21 nt, synthetic construct
  source 1..21: mol_type = other RNA
  ncRNA 1..21: ncRNA_class = other; note = mRNA
agaaaaaacgacctcgactta

SEQ ID NO: 11252 - DNA, 21 bp, synthetic construct
  source 1..21: mol_type = other DNA
gtctctgggtcacaatacgca

SEQ ID NO: 11253 - DNA, 21 bp, synthetic construct
  source 1..21: mol_type = other DNA
agcgccaccaaattaccgaac

SEQ ID NO: 11254 - DNA, 21 bp, synthetic construct
  source 1..21: mol_type = other DNA
acgatgagcttcacggtagca

SEQ ID NO: 11255 - DNA, 21 bp, synthetic construct
  source 1..21: mol_type = other DNA
ttaccggaaagccgcagtatg

SEQ ID NO: 11256 - DNA, 21 bp, synthetic construct
  source 1..21: mol_type = other DNA
agggctattggtcctcaggct

SEQ ID NO: 11257 - RNA, 21 nt, synthetic construct
  source 1..21: mol_type = other RNA
  ncRNA 1..21: ncRNA_class = other; note = mRNA
gttagtggtgggattgcttat

SEQ ID NO: 11258 - DNA, 21 bp, synthetic construct
  source 1..21: mol_type = other DNA
gcgatggcgtctcagtatgct

SEQ ID NO: 11259 - DNA, 21 bp, synthetic construct
  source 1..21: mol_type = other DNA
gtgactgggcaggcggggcgg

SEQ ID NO: 11260 - DNA, 21 bp, synthetic construct
  source 1..21: mol_type = other DNA
aatcctggtgtggtgctggct

SEQ ID NO: 11261 - DNA, 21 bp, synthetic construct
  source 1..21: mol_type = other DNA
ctacacatgggcaacctagcg

SEQ ID NO: 11262 - DNA, 21 bp, synthetic construct
  source 1..21: mol_type = other DNA
gacagccggttcatcagttcc

SEQ ID NO: 11263 - DNA, 21 bp, synthetic construct
  source 1..21: mol_type = other DNA
ttccggggcgaccaccactcg

SEQ ID NO: 11264 - DNA, 21 bp, synthetic construct
  source 1..21: mol_type = other DNA
cttagtcttggttctaagagt

SEQ ID NO: 11265 - DNA, 21 bp, synthetic construct
  source 1..21: mol_type = other DNA
agaggcgacttaggcctgacg

SEQ ID NO: 11266 - RNA, 21 nt, synthetic construct
  source 1..21: mol_type = other RNA
  ncRNA 1..21: ncRNA_class = other; note = mRNA
gataagcctaattcttcgtct

SEQ ID NO: 11267 - RNA, 21 nt, synthetic construct
  source 1..21: mol_type = other RNA
  ncRNA 1..21: ncRNA_class = other; note = mRNA
ctagacagcggtaaatcgctc

SEQ ID NO: 11268 - DNA, 21 bp, synthetic construct
  source 1..21: mol_type = other DNA
gaattcgcgcgacgtggaccc

SEQ ID NO: 11269 - DNA, 21 bp, synthetic construct
  source 1..21: mol_type = other DNA
gttagtgtagggtccagcggt

SEQ ID NO: 11270 - DNA, 21 bp, synthetic construct
  source 1..21: mol_type = other DNA
acggtgaattctacgggtagt

SEQ ID NO: 11271 - DNA, 21 bp, synthetic construct
  source 1..21: mol_type = other DNA
ggcacaatatcgacatcgaac

SEQ ID NO: 11272 - DNA, 21 bp, synthetic construct
  source 1..21: mol_type = other DNA
cctcgtgggaatgatagtaat

SEQ ID NO: 11273 - DNA, 21 bp, synthetic construct
  source 1..21: mol_type = other DNA
gttagtgggactactactttt

SEQ ID NO: 11274 - RNA, 21 nt, synthetic construct
  source 1..21: mol_type = other RNA
  ncRNA 1..21: ncRNA_class = other; note = mRNA
ggtgggtctctgactttgaat

SEQ ID NO: 11275 - DNA, 21 bp, synthetic construct
  source 1..21: mol_type = other DNA
ggttcggtgcagaggagtctt

SEQ ID NO: 11276 - DNA, 21 bp, synthetic construct
  source 1..21: mol_type = other DNA
tcggggggaaactacggggtt

SEQ ID NO: 11277 - RNA, 21 nt, synthetic construct
  source 1..21: mol_type = other RNA
  ncRNA 1..21: ncRNA_class = other; note = mRNA
accaacaaccaagcacacgcc

SEQ ID NO: 11278 - DNA, 21 bp, synthetic construct
  source 1..21: mol_type = other DNA
tctcgacacggagacatgacg

SEQ ID NO: 11279 - DNA, 21 bp, synthetic construct
  source 1..21: mol_type = other DNA
cttccgactatggataggggt

SEQ ID NO: 11280 - DNA, 21 bp, synthetic construct
  source 1..21: mol_type = other DNA
agtgtgacgattccttctggg

SEQ ID NO: 11281 - DNA, 21 bp, synthetic construct
  source 1..21: mol_type = other DNA
gggcgcaccgacagtgtagcc

SEQ ID NO: 11282 - RNA, 21 nt, synthetic construct
  source 1..21: mol_type = other RNA
  ncRNA 1..21: ncRNA_class = other; note = mRNA
gttactaagagtgagacgatg

SEQ ID NO: 11283 - DNA, 21 bp, synthetic construct
  source 1..21: mol_type = other DNA
cctaatggtcagtctcctagg

SEQ ID NO: 11284 - DNA, 21 bp, synthetic construct
  source 1..21: mol_type = other DNA
agggcggtacaagtctcagct

SEQ ID NO: 11285 - DNA, 21 bp, synthetic construct
  source 1..21: mol_type = other DNA
ttgtttaatggtatgtcgtcg

SEQ ID NO: 11286 - DNA, 21 bp, synthetic construct
  source 1..21: mol_type = other DNA
gggggtcttcggcaggttctt

SEQ ID NO: 11287 - RNA, 21 nt, synthetic construct
  source 1..21: mol_type = other RNA
  ncRNA 1..21: ncRNA_class = other; note = mRNA
gataggcatcgggagtcgatt

SEQ ID NO: 11288 - RNA, 21 nt, synthetic construct
  source 1..21: mol_type = other RNA
  ncRNA 1..21: ncRNA_class = other; note = mRNA
aataaggatgggggtttgaat

SEQ ID NO: 11289 - DNA, 21 bp, synthetic construct
  source 1..21: mol_type = other DNA
acaggaactggcacgagagac

SEQ ID NO: 11290 - DNA, 21 bp, synthetic construct
  source 1..21: mol_type = other DNA
gggggtacgtcgattggtaat

SEQ ID NO: 11291 - DNA, 21 bp, synthetic construct
  source 1..21: mol_type = other DNA
aagcttaatgagattcggctg

SEQ ID NO: 11292 - DNA, 21 bp, synthetic construct
  source 1..21: mol_type = other DNA
cgtgctgtgcaggtatcggtg

SEQ ID NO: 11293 - DNA, 21 bp, synthetic construct
  source 1..21: mol_type = other DNA
atgggtggggctttgggtaat

SEQ ID NO: 11294 - DNA, 21 bp, synthetic construct
  source 1..21: mol_type = other DNA
attcggggtgatggtgagcag

SEQ ID NO: 11295 - RNA, 21 nt, synthetic construct
  source 1..21: mol_type = other RNA
  ncRNA 1..21: ncRNA_class = other; note = mRNA
aatgttgcgagttctcagttg

SEQ ID NO: 11296 - DNA, 21 bp, synthetic construct
  source 1..21: mol_type = other DNA
gtagggtcgggcgtaggactc

SEQ ID NO: 11297 - DNA, 21 bp, synthetic construct
  source 1..21: mol_type = other DNA
ctccaacgtggagaaggggcg

SEQ ID NO: 11298 - DNA, 21 bp, synthetic construct
  source 1..21: mol_type = other DNA
atggctagtgatatgagtagg

SEQ ID NO: 11299 - DNA, 21 bp, synthetic construct
  source 1..21: mol_type = other DNA
acgttgcctaatacggcggct

SEQ ID NO: 11300 - DNA, 21 bp, synthetic construct
  source 1..21: mol_type = other DNA
caatcaaacgtagtcgttggt

SEQ ID NO: 11301 - RNA, 21 nt, synthetic construct
  source 1..21: mol_type = other RNA
  ncRNA 1..21: ncRNA_class = other; note = mRNA
atgttcagtgcagcgtcaaaa

SEQ ID NO: 11302 - DNA, 21 bp, synthetic construct
  source 1..21: mol_type = other DNA
aatatgttgtcgactgttcct

SEQ ID NO: 11303 - DNA, 21 bp, synthetic construct
  source 1..21: mol_type = other DNA
gtttcggcggttcaggctcgt

SEQ ID NO: 11304 - DNA, 21 bp, synthetic construct
  source 1..21: mol_type = other DNA
catattgctcagactgctagt

SEQ ID NO: 11305 - DNA, 21 bp, synthetic construct
  source 1..21: mol_type = other DNA
tttgatgcgaaggcgcctacg

SEQ ID NO: 11306 - DNA, 21 bp, synthetic construct
  source 1..21: mol_type = other DNA
ttgggtcagtcgaatcttgcg

SEQ ID NO: 11307 - DNA, 21 bp, synthetic construct
  source 1..21: mol_type = other DNA
tcagcccgtaacaccttggta

SEQ ID NO: 11308 - DNA, 21 bp, synthetic construct
  source 1..21: mol_type = other DNA
ctgaagagtacttttattggt

SEQ ID NO: 11309 - DNA, 21 bp, synthetic construct
  source 1..21: mol_type = other DNA
gcggataggatgacgactgat

SEQ ID NO: 11310 - RNA, 21 nt, synthetic construct
  source 1..21: mol_type = other RNA
  ncRNA 1..21: ncRNA_class = other; note = mRNA
tttatggatactgggtctatg

SEQ ID NO: 11311 - DNA, 21 bp, synthetic construct
  source 1..21: mol_type = other DNA
cacggcgtcggaggcccccca

SEQ ID NO: 11312 - DNA, 21 bp, synthetic construct
  source 1..21: mol_type = other DNA
gggcactacggtgccatggct

SEQ ID NO: 11313 - DNA, 21 bp, synthetic construct
  source 1..21: mol_type = other DNA
ttaggtactcaatccgaccgc

SEQ ID NO: 11314 - RNA, 21 nt, synthetic construct
  source 1..21: mol_type = other RNA
  ncRNA 1..21: ncRNA_class = other; note = mRNA
aattcgttgcctagggatggt

SEQ ID NO: 11315 - DNA, 21 bp, synthetic construct
  source 1..21: mol_type = other DNA
cgtagtatggttagtgatggt

SEQ ID NO: 11316 - DNA, 21 bp, synthetic construct
  source 1..21: mol_type = other DNA
ggtgttagtggttcgacgctt

SEQ ID NO: 11317 - DNA, 21 bp, synthetic construct
  source 1..21: mol_type = other DNA
aacagcgtaagcggaggctca

SEQ ID NO: 11318 - DNA, 21 bp, synthetic construct
  source 1..21: mol_type = other DNA
actgttgcggggcagaatgcg

SEQ ID NO: 11319 - DNA, 21 bp, synthetic construct
  source 1..21: mol_type = other DNA
ccggggggcgggactttagcc

SEQ ID NO: 11320 - RNA, 21 nt, synthetic construct
  source 1..21: mol_type = other RNA
  ncRNA 1..21: ncRNA_class = other; note = mRNA
gctgggaattatgggactagt

SEQ ID NO: 11321 - DNA, 21 bp, synthetic construct
  source 1..21: mol_type = other DNA
gggagtggcgtgcccttagcg

SEQ ID NO: 11322 - DNA, 21 bp, synthetic construct
  source 1..21: mol_type = other DNA
cgtggggatgggatggctggt

SEQ ID NO: 11323 - DNA, 21 bp, synthetic construct
  source 1..21: mol_type = other DNA
actttggggggtggtttgtct

SEQ ID NO: 11324 - RNA, 21 nt, synthetic construct
  source 1..21: mol_type = other RNA
  ncRNA 1..21: ncRNA_class = other; note = mRNA
gctattgttaatagtcctatt

SEQ ID NO: 11325 - DNA, 21 bp, synthetic construct
  source 1..21: mol_type = other DNA
actggtgatagtcgtacggtg

SEQ ID NO: 11326 - DNA, 21 bp, synthetic construct
  source 1..21: mol_type = other DNA
tacccccacactagcatcgct

SEQ ID NO: 11327 - DNA, 21 bp, synthetic construct
  source 1..21: mol_type = other DNA
agtgttggtagtactgggctg

SEQ ID NO: 11328 - DNA, 21 bp, synthetic construct
  source 1..21: mol_type = other DNA
gattcgaagggttcgcctacg

SEQ ID NO: 11329 - RNA, 21 nt, synthetic construct
  source 1..21: mol_type = other RNA
  ncRNA 1..21: ncRNA_class = other; note = mRNA
agtaagactgggctgggggct

SEQ ID NO: 11330 - RNA, 21 nt, synthetic construct
  source 1..21: mol_type = other RNA
  ncRNA 1..21: ncRNA_class = other; note = mRNA
gtttcgtctggtgtgcttaat

SEQ ID NO: 11331 - DNA, 21 bp, synthetic construct
  source 1..21: mol_type = other DNA
gacttagcaagccacgtccac

SEQ ID NO: 11332 - RNA, 21 nt, synthetic construct
  source 1..21: mol_type = other RNA
  ncRNA 1..21: ncRNA_class = other; note = mRNA
atgggggctcaaatgcgtatg

SEQ ID NO: 11333 - DNA, 21 bp, synthetic construct
  source 1..21: mol_type = other DNA
gctggtcttcagttgactggg

SEQ ID NO: 11334 - DNA, 21 bp, synthetic construct
  source 1..21: mol_type = other DNA
ataggcagcaacaccacgatc

SEQ ID NO: 11335 - DNA, 21 bp, synthetic construct
  source 1..21: mol_type = other DNA
gtcgggaccggggccaccggt

SEQ ID NO: 11336 - RNA, 21 nt, synthetic construct
  source 1..21: mol_type = other RNA
  ncRNA 1..21: ncRNA_class = other; note = mRNA
tcgcaagccgtatctctagga

SEQ ID NO: 11337 - RNA, 21 nt, synthetic construct
  source 1..21: mol_type = other RNA
  ncRNA 1..21: ncRNA_class = other; note = mRNA
accacaaaattattagtcaac

SEQ ID NO: 11338 - RNA, 21 nt, synthetic construct
  source 1..21: mol_type = other RNA
  ncRNA 1..21: ncRNA_class = other; note = mRNA
gtggatggtaggattaatagt

SEQ ID NO: 11339 - DNA, 21 bp, synthetic construct
  source 1..21: mol_type = other DNA
aaaacgaacccatcactcctg

SEQ ID NO: 11340 - DNA, 21 bp, synthetic construct
  source 1..21: mol_type = other DNA
gccgtgcgcgaagaaagatcc

SEQ ID NO: 11341 - DNA, 21 bp, synthetic construct
  source 1..21: mol_type = other DNA
aattcgattaattctgtgcgg

SEQ ID NO: 11342 - DNA, 21 bp, synthetic construct
  source 1..21: mol_type = other DNA
aatgtgtctggtgtgactggt

SEQ ID NO: 11343 - DNA, 21 bp, synthetic construct
  source 1..21: mol_type = other DNA
atgcaaggcctgatcgggtct

SEQ ID NO: 11344 - DNA, 21 bp, synthetic construct
  source 1..21: mol_type = other DNA
ggggagaagattcctgctatg

SEQ ID NO: 11345 - DNA, 21 bp, synthetic construct
  source 1..21: mol_type = other DNA
ctattcgcatcttccgtggcc

SEQ ID NO: 11346 - DNA, 21 bp, synthetic construct
  source 1..21: mol_type = other DNA
aagtttggggaggcggtgccg

SEQ ID NO: 11347 - DNA, 21 bp, synthetic construct
  source 1..21: mol_type = other DNA
agagcgagcgtcgcgaacgac

SEQ ID NO: 11348 - DNA, 21 bp, synthetic construct
  source 1..21: mol_type = other DNA
ggaaactccggcgtgcactcg

SEQ ID NO: 11349 - DNA, 21 bp, synthetic construct
  source 1..21: mol_type = other DNA
cctatgggtggttcgggtacg

SEQ ID NO: 11350 - DNA, 21 bp, synthetic construct
  source 1..21: mol_type = other DNA
ggacacgtcggaatgggccaa

SEQ ID NO: 11351 - DNA, 21 bp, synthetic construct
  source 1..21: mol_type = other DNA
gacaaaatggtggtccttgcc

SEQ ID NO: 11352 - DNA, 21 bp, synthetic construct
  source 1..21: mol_type = other DNA
ttaagtaccatgccgcgagga

SEQ ID NO: 11353 - DNA, 21 bp, synthetic construct
  source 1..21: mol_type = other DNA
aggggtgatatgattagtact

SEQ ID NO: 11354 - DNA, 21 bp, synthetic construct
  source 1..21: mol_type = other DNA
ggggttacgtctcagcctcgt

SEQ ID NO: 11355 - RNA, 21 nt, synthetic construct
  source 1..21: mol_type = other RNA
  ncRNA 1..21: ncRNA_class = other; note = mRNA
cgtgattctgggaagagttcg

SEQ ID NO: 11356 - DNA, 21 bp, synthetic construct
  source 1..21: mol_type = other DNA
gtgaagactgttattcaggtg

SEQ ID NO: 11357 - DNA, 21 bp, synthetic construct
  source 1..21: mol_type = other DNA
ggcggcaaacaagtactgtcg

SEQ ID NO: 11358 - DNA, 21 bp, synthetic construct
  source 1..21: mol_type = other DNA
cctgtgaggggtgatatgact

SEQ ID NO: 11359 - RNA, 21 nt, synthetic construct
  source 1..21: mol_type = other RNA
  ncRNA 1..21: ncRNA_class = other; note = mRNA
cttttaggcaaccgccaagct

SEQ ID NO: 11360 - DNA, 21 bp, synthetic construct
  source 1..21: mol_type = other DNA
gcgagtttggcgcggggggtt

SEQ ID NO: 11361 - RNA, 21 nt, synthetic construct
  source 1..21: mol_type = other RNA
  ncRNA 1..21: ncRNA_class = other; note = mRNA
cctgttactgggtcttctgtg

SEQ ID NO: 11362 - RNA, 21 nt, synthetic construct
  source 1..21: mol_type = other RNA
  ncRNA 1..21: ncRNA_class = other; note = mRNA
attcagcataatggtattctt

SEQ ID NO: 11363 - DNA, 21 bp, synthetic construct
  source 1..21: mol_type = other DNA
ctgcagaggggggagggtcct

SEQ ID NO: 11364 - DNA, 21 bp, synthetic construct
  source 1..21: mol_type = other DNA
ttaggcgtcgtctcgacgaac

SEQ ID NO: 11365 - DNA, 21 bp, synthetic construct
  source 1..21: mol_type = other DNA
gtcacgcacggcggaggtgta

SEQ ID NO: 11366 - DNA, 21 bp, synthetic construct
  source 1..21: mol_type = other DNA
acgattgcgaataatcgggtt

SEQ ID NO: 11367 - DNA, 21 bp, synthetic construct
  source 1..21: mol_type = other DNA
gctcttcagcatagtgctgcg

SEQ ID NO: 11368 - RNA, 21 nt, synthetic construct
  source 1..21: mol_type = other RNA
  ncRNA 1..21: ncRNA_class = other; note = mRNA
tttcagggtgttggtccgtcg

SEQ ID NO: 11369 - DNA, 21 bp, synthetic construct
  source 1..21: mol_type = other DNA
caatcaatatctctagaacgc

SEQ ID NO: 11370 - RNA, 21 nt, synthetic construct
  source 1..21: mol_type = other RNA
  ncRNA 1..21: ncRNA_class = other; note = mRNA
gttttgcgtactcatcttagt

SEQ ID NO: 11371 - DNA, 21 bp, synthetic construct
  source 1..21: mol_type = other DNA
aatgctaggcaggatatgatg

SEQ ID NO: 11372 - DNA, 21 bp, synthetic construct
  source 1..21: mol_type = other DNA
cagattaatcaggttcagaag

SEQ ID NO: 11373 - DNA, 21 bp, synthetic construct
  source 1..21: mol_type = other DNA
ttccaacgagaagtagaccgg

SEQ ID NO: 11374 - DNA, 21 bp, synthetic construct
  source 1..21: mol_type = other DNA
gtttctatcggcactagcgcg

SEQ ID NO: 11375 - RNA, 21 nt, synthetic construct
  source 1..21: mol_type = other RNA
  ncRNA 1..21: ncRNA_class = other; note = mRNA
gttagttatagtgcggagtat

SEQ ID NO: 11376 - DNA, 21 bp, synthetic construct
  source 1..21: mol_type = other DNA
atgtcaaccggagccgaaagg

SEQ ID NO: 11377 - DNA, 21 bp, synthetic construct
  source 1..21: mol_type = other DNA
atgaaggggttggtgagtaat

SEQ ID NO: 11378 - DNA, 21 bp, synthetic construct
  source 1..21: mol_type = other DNA
ccatcaggcacaggaaacgcg

SEQ ID NO: 11379 - DNA, 21 bp, synthetic construct
  source 1..21: mol_type = other DNA
cagcgtgattctggtcatttg

SEQ ID NO: 11380 - DNA, 21 bp, synthetic construct
  source 1..21: mol_type = other DNA
gtgcgtgtgtctgatgctgtt

SEQ ID NO: 11381 - DNA, 21 bp, synthetic construct
  source 1..21: mol_type = other DNA
aactccgacgggcgtataatc

SEQ ID NO: 11382 - DNA, 21 bp, synthetic construct
  source 1..21: mol_type = other DNA
atggcttcggggttgcgtgag

SEQ ID NO: 11383 - DNA, 21 bp, synthetic construct
  source 1..21: mol_type = other DNA
ggagggcgaacttccatggaa

SEQ ID NO: 11384 - RNA, 21 nt, synthetic construct
  source 1..21: mol_type = other RNA
  ncRNA 1..21: ncRNA_class = other; note = mRNA
acggctgattttaagaaggcg

SEQ ID NO: 11385 - RNA, 21 nt, synthetic construct
  source 1..21: mol_type = other RNA
  ncRNA 1..21: ncRNA_class = other; note = mRNA
gataagactaattcttcggct

SEQ ID NO: 11386 - DNA, 21 bp, synthetic construct
  source 1..21: mol_type = other DNA
ttccaaggagtattaaccggg

SEQ ID NO: 11387 - RNA, 21 nt, synthetic construct
  source 1..21: mol_type = other RNA
  ncRNA 1..21: ncRNA_class = other; note = mRNA
tggctggggactacggcttct

SEQ ID NO: 11388 - DNA, 21 bp, synthetic construct
  source 1..21: mol_type = other DNA
tccactggagaacacggtggc

SEQ ID NO: 11389 - DNA, 21 bp, synthetic construct
  source 1..21: mol_type = other DNA
gcggttggtccgagtggtggg

SEQ ID NO: 11390 - DNA, 21 bp, synthetic construct
  source 1..21: mol_type = other DNA
actgtatcacaaggactaaac

SEQ ID NO: 11391 - DNA, 21 bp, synthetic construct
  source 1..21: mol_type = other DNA
gggcgagacgttggagtagcc

SEQ ID NO: 11392 - DNA, 21 bp, synthetic construct
  source 1..21: mol_type = other DNA
tcttacaactcaagtgtagta

SEQ ID NO: 11393 - DNA, 21 bp, synthetic construct
  source 1..21: mol_type = other DNA
atggcgacgaagtttctggat

SEQ ID NO: 11394 - RNA, 21 nt, synthetic construct
  source 1..21: mol_type = other RNA
  ncRNA 1..21: ncRNA_class = other; note = mRNA
cacaactccgcaatgaacgaa

SEQ ID NO: 11395 - DNA, 21 bp, synthetic construct
  source 1..21: mol_type = other DNA
caaccagtcggtgctctccca

SEQ ID NO: 11396 - DNA, 21 bp, synthetic construct
  source 1..21: mol_type = other DNA
acctcgacagttgtcagtgcc

SEQ ID NO: 11397 - DNA, 21 bp, synthetic construct
  source 1..21: mol_type = other DNA
tcgatttctggtggggttatt

SEQ ID NO: 11398 - DNA, 21 bp, synthetic construct
  source 1..21: mol_type = other DNA
ctcgtaagtggttcttcacac

SEQ ID NO: 11399 - DNA, 21 bp, synthetic construct
  source 1..21: mol_type = other DNA
accggaggtgtcggcgtcacg

SEQ ID NO: 11400 - DNA, 21 bp, synthetic construct
  source 1..21: mol_type = other DNA
tacagaaacgcagacatgaac

SEQ ID NO: 11401 - DNA, 21 bp, synthetic construct
  source 1..21: mol_type = other DNA
tttcatagtgagaagattgct

SEQ ID NO: 11402 - DNA, 21 bp, synthetic construct
  source 1..21: mol_type = other DNA
caccaagccagcgttatccaa

SEQ ID NO: 11403 - DNA, 21 bp, synthetic construct
  source 1..21: mol_type = other DNA
ttcaactcatcaggaaaaggc

SEQ ID NO: 11404 - DNA, 21 bp, synthetic construct
  source 1..21: mol_type = other DNA
agtcctgagtatcgtttgggt

SEQ ID NO: 11405 - RNA, 21 nt, synthetic construct
  source 1..21: mol_type = other RNA
  ncRNA 1..21: ncRNA_class = other; note = mRNA
ggtgtgctgcgatccgaaggg

SEQ ID NO: 11406 - DNA, 21 bp, synthetic construct
  source 1..21: mol_type = other DNA
agtcagagtgttgttcatgcg

SEQ ID NO: 11407 - RNA, 21 nt, synthetic construct
  source 1..21: mol_type = other RNA
  ncRNA 1..21: ncRNA_class = other; note = mRNA
ataagaagcgtggaacaatct

SEQ ID NO: 11408 - RNA, 21 nt, synthetic construct
  source 1..21: mol_type = other RNA
  ncRNA 1..21: ncRNA_class = other; note = mRNA
tctgtattgtcaaccgggcct

SEQ ID NO: 11409 - DNA, 21 bp, synthetic construct
  source 1..21: mol_type = other DNA
ctcaaaagcgcccaatccgaa

SEQ ID NO: 11410 - DNA, 21 bp, synthetic construct
  source 1..21: mol_type = other DNA
gtcccaagcgccggcgtaggg

SEQ ID NO: 11411 - DNA, 21 bp, synthetic construct
  source 1..21: mol_type = other DNA
gttggggcttctgggcttcgg

SEQ ID NO: 11412 - DNA, 21 bp, synthetic construct
  source 1..21: mol_type = other DNA
gtgcttcggggggatacgtat

SEQ ID NO: 11413 - DNA, 21 bp, synthetic construct
  source 1..21: mol_type = other DNA
actattcctcttaggaatcag

SEQ ID NO: 11414 - DNA, 21 bp, synthetic construct
  source 1..21: mol_type = other DNA
cagagagagtcggggtattcg

SEQ ID NO: 11415 - DNA, 21 bp, synthetic construct
  source 1..21: mol_type = other DNA
ggatgggtcgaagttcaaagt

SEQ ID NO: 11416 - DNA, 21 bp, synthetic construct
  source 1..21: mol_type = other DNA
gctttgggtcctcgtgattct

SEQ ID NO: 11417 - RNA, 21 nt, synthetic construct
  source 1..21: mol_type = other RNA
  ncRNA 1..21: ncRNA_class = other; note = mRNA
cctgttcctgggtcttctgtg

SEQ ID NO: 11418 - DNA, 21 bp, synthetic construct
  source 1..21: mol_type = other DNA
aacggccacatgaaactcgaa

SEQ ID NO: 11419 - DNA, 21 bp, synthetic construct
  source 1..21: mol_type = other DNA
ttgcatcttgtttcgacgcct

SEQ ID NO: 11420 - RNA, 21 nt, synthetic construct
  source 1..21: mol_type = other RNA
  ncRNA 1..21: ncRNA_class = other; note = mRNA
gctggtattacgggtagtggt

SEQ ID NO: 11421 - DNA, 21 bp, synthetic construct
  source 1..21: mol_type = other DNA
ccagccgtcggtacaccctct

SEQ ID NO: 11422 - DNA, 21 bp, synthetic construct
  source 1..21: mol_type = other DNA
tcacacgccactgctgaccta

SEQ ID NO: 11423 - DNA, 21 bp, synthetic construct
  source 1..21: mol_type = other DNA
ttcggcgcatcatccgtagcc

SEQ ID NO: 11424 - DNA, 21 bp, synthetic construct
  source 1..21: mol_type = other DNA
aaccacaaagaaagcacggta

SEQ ID NO: 11425 - RNA, 21 nt, synthetic construct
  source 1..21: mol_type = other RNA
  ncRNA 1..21: ncRNA_class = other; note = mRNA
cattctgtgagtcctacgagt

SEQ ID NO: 11426 - DNA, 21 bp, synthetic construct
  source 1..21: mol_type = other DNA
tttgcgagtgcggctatgggt

SEQ ID NO: 11427 - DNA, 21 bp, synthetic construct
  source 1..21: mol_type = other DNA
gcgggtcttgttcatacggtt

SEQ ID NO: 11428 - DNA, 21 bp, synthetic construct
  source 1..21: mol_type = other DNA
gatcgtagttcggtgcttaat

SEQ ID NO: 11429 - RNA, 21 nt, synthetic construct
  source 1..21: mol_type = other RNA
  ncRNA 1..21: ncRNA_class = other; note = mRNA
gctggtaattatgctggtgtt

SEQ ID NO: 11430 - DNA, 21 bp, synthetic construct
  source 1..21: mol_type = other DNA
tttgtgagtagtacgacggct

SEQ ID NO: 11431 - DNA, 21 bp, synthetic construct
  source 1..21: mol_type = other DNA
gattcgattagtcggagtgtg

SEQ ID NO: 11432 - DNA, 21 bp, synthetic construct
  source 1..21: mol_type = other DNA
cactcaatgggaaaacctatg

SEQ ID NO: 11433 - DNA, 21 bp, synthetic construct
  source 1..21: mol_type = other DNA
gggcggggggggggatcgtgt

SEQ ID NO: 11434 - DNA, 21 bp, synthetic construct
  source 1..21: mol_type = other DNA
tgggtagcaacagtatctcgg

SEQ ID NO: 11435 - DNA, 21 bp, synthetic construct
  source 1..21: mol_type = other DNA
tctgatcggggtagtagtgtg

SEQ ID NO: 11436 - RNA, 21 nt, synthetic construct
  source 1..21: mol_type = other RNA
  ncRNA 1..21: ncRNA_class = other; note = mRNA
cgggaggagacgaggcttccg

SEQ ID NO: 11437 - DNA, 21 bp, synthetic construct
  source 1..21: mol_type = other DNA
cgcctaggcttccttaccgac

SEQ ID NO: 11438 - RNA, 21 nt, synthetic construct
  source 1..21: mol_type = other RNA
  ncRNA 1..21: ncRNA_class = other; note = mRNA
tatatggatactgggtctatg

SEQ ID NO: 11439 - RNA, 21 nt, synthetic construct
  source 1..21: mol_type = other RNA
  ncRNA 1..21: ncRNA_class = other; note = mRNA
actgcgaagccgcagccgatt

SEQ ID NO: 11440 - DNA, 21 bp, synthetic construct
  source 1..21: mol_type = other DNA
acttattcggggatgggtgcg

SEQ ID NO: 11441 - DNA, 21 bp, synthetic construct
  source 1..21: mol_type = other DNA
gggatgcggtttggtacgacg

SEQ ID NO: 11442 - DNA, 21 bp, synthetic construct
  source 1..21: mol_type = other DNA
acctccgtcaacgccatggcc

SEQ ID NO: 11443 - DNA, 21 bp, synthetic construct
  source 1..21: mol_type = other DNA
accttcagcgcgagcggcagc

SEQ ID NO: 11444 - DNA, 21 bp, synthetic construct
  source 1..21: mol_type = other DNA
gagggtagttttaataggtcg

SEQ ID NO: 11445 - DNA, 21 bp, synthetic construct
  source 1..21: mol_type = other DNA
gagcagcggaatgctgagagt

SEQ ID NO: 11446 - DNA, 21 bp, synthetic construct
  source 1..21: mol_type = other DNA
ctgactccggctttgggtacg

SEQ ID NO: 11447 - DNA, 21 bp, synthetic construct
  source 1..21: mol_type = other DNA
attggtacttcggggggtgtg

SEQ ID NO: 11448 - RNA, 21 nt, synthetic construct
  source 1..21: mol_type = other RNA
  ncRNA 1..21: ncRNA_class = other; note = mRNA
aacgctcgcctgctgacagca

SEQ ID NO: 11449 - RNA, 21 nt, synthetic construct
  source 1..21: mol_type = other RNA
  ncRNA 1..21: ncRNA_class = other; note = mRNA
ggtagtagtgggtcggtgagg

SEQ ID NO: 11450 - RNA, 21 nt, synthetic construct
  source 1..21: mol_type = other RNA
  ncRNA 1..21: ncRNA_class = other; note = mRNA
gctcacgaaataaacggggac

SEQ ID NO: 11451 - DNA, 21 bp, synthetic construct
  source 1..21: mol_type = other DNA
tacaacaactctatcgaaagg

SEQ ID NO: 11452 - DNA, 21 bp, synthetic construct
  source 1..21: mol_type = other DNA
tccctccactcctctgcccaa

SEQ ID NO: 11453 - DNA, 21 bp, synthetic construct
  source 1..21: mol_type = other DNA
cacggacgcacagacacgctc

SEQ ID NO: 11454 - DNA, 21 bp, synthetic construct
  source 1..21: mol_type = other DNA
ctaacaatgtcgagtcacgta

SEQ ID NO: 11455 - DNA, 21 bp, synthetic construct
  source 1..21: mol_type = other DNA
ccggccgccgtgtcacgagaa

SEQ ID NO: 11456 - DNA, 21 bp, synthetic construct
  source 1..21: mol_type = other DNA
gtggtgcagcggttttcttct

SEQ ID NO: 11457 - DNA, 21 bp, synthetic construct
  source 1..21: mol_type = other DNA
tctttggggaagattgtgcct

SEQ ID NO: 11458 - DNA, 21 bp, synthetic construct
  source 1..21: mol_type = other DNA
gttttttcgtctggccttggt

SEQ ID NO: 11459 - DNA, 21 bp, synthetic construct
  source 1..21: mol_type = other DNA
gtgactagtgttgggaattct

SEQ ID NO: 11460 - DNA, 21 bp, synthetic construct
  source 1..21: mol_type = other DNA
tttacggggggtcatctggcg

SEQ ID NO: 11461 - DNA, 21 bp, synthetic construct
  source 1..21: mol_type = other DNA
accactctgggaatctccggc

SEQ ID NO: 11462 - RNA, 21 nt, synthetic construct
  source 1..21: mol_type = other RNA
  ncRNA 1..21: ncRNA_class = other; note = mRNA
gtaaaagcgctggctctggca

SEQ ID NO: 11463 - DNA, 21 bp, synthetic construct
  source 1..21: mol_type = other DNA
acggctgcgtattctgagagg

SEQ ID NO: 11464 - DNA, 21 bp, synthetic construct
  source 1..21: mol_type = other DNA
gatgcgcggatgtcgcatggt

SEQ ID NO: 11465 - DNA, 21 bp, synthetic construct
  source 1..21: mol_type = other DNA
gaacaacgagtaaacgaaaaa

SEQ ID NO: 11466 - DNA, 21 bp, synthetic construct
  source 1..21: mol_type = other DNA
agtgttggggggtttcctcgg

SEQ ID NO: 11467 - DNA, 21 bp, synthetic construct
  source 1..21: mol_type = other DNA
agcgacggcgcgcaagtccgg

SEQ ID NO: 11468 - DNA, 21 bp, synthetic construct
  source 1..21: mol_type = other DNA
atgacctctctatcggtggct

SEQ ID NO: 11469 - DNA, 21 bp, synthetic construct
  source 1..21: mol_type = other DNA
aaccgggaagtggcagaccac

SEQ ID NO: 11470 - DNA, 21 bp, synthetic construct
  source 1..21: mol_type = other DNA
actggagtcggtagccacgca

SEQ ID NO: 11471 - DNA, 21 bp, synthetic construct
  source 1..21: mol_type = other DNA
cagtttcagaggtctgatgag

SEQ ID NO: 11472 - DNA, 21 bp, synthetic construct
  source 1..21: mol_type = other DNA
ctgcctggttatagttctagt

SEQ ID NO: 11473 - DNA, 21 bp, synthetic construct
  source 1..21: mol_type = other DNA
gttggagcacggggacccgta

SEQ ID NO: 11474 - DNA, 21 bp, synthetic construct
  source 1..21: mol_type = other DNA
ttggagcagtctcatgtgacg

SEQ ID NO: 11475 - DNA, 21 bp, synthetic construct
  source 1..21: mol_type = other DNA
ctttttggtggggttgctgcg

SEQ ID NO: 11476 - DNA, 21 bp, synthetic construct
  source 1..21: mol_type = other DNA
actgataatttgggggtgttt

SEQ ID NO: 11477 - DNA, 21 bp, synthetic construct
  source 1..21: mol_type = other DNA
agtgttaagctggggagtact

SEQ ID NO: 11478 - DNA, 21 bp, synthetic construct
  source 1..21: mol_type = other DNA
cgcgccgcagcggtaggtcta

SEQ ID NO: 11479 - DNA, 21 bp, synthetic construct
  source 1..21: mol_type = other DNA
ttggttaggattggtggtgct

SEQ ID NO: 11480 - RNA, 21 nt, synthetic construct
  source 1..21: mol_type = other RNA
  ncRNA 1..21: ncRNA_class = other; note = mRNA
cttagggggatgagtaatggg

SEQ ID NO: 11481 - DNA, 21 bp, synthetic construct
  source 1..21: mol_type = other DNA
agtatgcggtctggtgataat

SEQ ID NO: 11482 - RNA, 21 nt, synthetic construct
  source 1..21: mol_type = other RNA
  ncRNA 1..21: ncRNA_class = other; note = mRNA
ctggggattagttatgcggcg

SEQ ID NO: 11483 - DNA, 21 bp, synthetic construct
  source 1..21: mol_type = other DNA
ttgtctattgagatgcggggt

SEQ ID NO: 11484 - DNA, 21 bp, synthetic construct
  source 1..21: mol_type = other DNA
ctcccagcagtcacactttct

SEQ ID NO: 11485 - DNA, 21 bp, synthetic construct
  source 1..21: mol_type = other DNA
aatatgggtgtgcaggggatt

SEQ ID NO: 11486 - DNA, 21 bp, synthetic construct
  source 1..21: mol_type = other DNA
gttaggacttcggagatgagt

SEQ ID NO: 11487 - DNA, 21 bp, synthetic construct
  source 1..21: mol_type = other DNA
gaacaagacagaaggacaacc

SEQ ID NO: 11488 - RNA, 21 nt, synthetic construct
  source 1..21: mol_type = other RNA
  ncRNA 1..21: ncRNA_class = other; note = mRNA
atgtcgtcacgactcaacgct

SEQ ID NO: 11489 - DNA, 21 bp, synthetic construct
  source 1..21: mol_type = other DNA
agtaggggggatgagaattct

SEQ ID NO: 11490 - DNA, 21 bp, synthetic construct
  source 1..21: mol_type = other DNA
gacggggtccacagaccttca

SEQ ID NO: 11491 - DNA, 21 bp, synthetic construct
  source 1..21: mol_type = other DNA
gggcctagtgcgtcgcctggt

SEQ ID NO: 11492 - DNA, 21 bp, synthetic construct
  source 1..21: mol_type = other DNA
acgacgcagggtcctaagcct

SEQ ID NO: 11493 - DNA, 21 bp, synthetic construct
  source 1..21: mol_type = other DNA
atgggggatccgaggacggtg

SEQ ID NO: 11494 - DNA, 21 bp, synthetic construct
  source 1..21: mol_type = other DNA
aatcagaatcggggttctgct

SEQ ID NO: 11495 - DNA, 21 bp, synthetic construct
  source 1..21: mol_type = other DNA
tttcggaatgatcagagttct

SEQ ID NO: 11496 - DNA, 21 bp, synthetic construct
  source 1..21: mol_type = other DNA
cggactgtcgacgcgagaatc

SEQ ID NO: 11497 - DNA, 21 bp, synthetic construct
  source 1..21: mol_type = other DNA
acgcgtaacttcgacgtcgct

SEQ ID NO: 11498 - RNA, 21 nt, synthetic construct
  source 1..21: mol_type = other RNA
  ncRNA 1..21: ncRNA_class = other; note = mRNA
gctgtgcaggaggcgaggaat

SEQ ID NO: 11499 - DNA, 21 bp, synthetic construct
  source 1..21: mol_type = other DNA
gtttcgttggctactgcgggt

SEQ ID NO: 11500 - RNA, 21 nt, synthetic construct
  source 1..21: mol_type = other RNA
  ncRNA 1..21: ncRNA_class = other; note = mRNA
ttgggtgttagttggaagggg

SEQ ID NO: 11501 - DNA, 21 bp, synthetic construct
  source 1..21: mol_type = other DNA
ttcgaccaaaaaagcccatac

SEQ ID NO: 11502 - DNA, 21 bp, synthetic construct
  source 1..21: mol_type = other DNA
tcttacaccacatcgttcgcg

SEQ ID NO: 11503 - DNA, 21 bp, synthetic construct
  source 1..21: mol_type = other DNA
ctgcataatgggaatgatggg

SEQ ID NO: 11504 - RNA, 21 nt, synthetic construct
  source 1..21: mol_type = other RNA
  ncRNA 1..21: ncRNA_class = other; note = mRNA
catgtgagtggtagtattatt

SEQ ID NO: 11505 - RNA, 21 nt, synthetic construct
  source 1..21: mol_type = other RNA
  ncRNA 1..21: ncRNA_class = other; note = mRNA
ctacggggactttctacaggc

SEQ ID NO: 11506 - DNA, 21 bp, synthetic construct
  source 1..21: mol_type = other DNA
gtgagaacgtctgaaatggga

SEQ ID NO: 11507 - DNA, 21 bp, synthetic construct
  source 1..21: mol_type = other DNA
ataggatcgacttacgtatca

SEQ ID NO: 11508 - DNA, 21 bp, synthetic construct
  source 1..21: mol_type = other DNA
acgggccgcggaacggaacac

SEQ ID NO: 11509 - RNA, 21 nt, synthetic construct
  source 1..21: mol_type = other RNA
  ncRNA 1..21: ncRNA_class = other; note = mRNA
tatccgggtaaggagggtatt

SEQ ID NO: 11510 - RNA, 21 nt, synthetic construct
  source 1..21: mol_type = other RNA
  ncRNA 1..21: ncRNA_class = other; note = mRNA
gcggtagcaaacgtgccaatg

SEQ ID NO: 11511 - DNA, 21 bp, synthetic construct
  source 1..21: mol_type = other DNA
gtcccatctagttcgataatc

SEQ ID NO: 11512 - DNA, 21 bp, synthetic construct
  source 1..21: mol_type = other DNA
ctgttggctcaggtttcttcg

SEQ ID NO: 11513 - DNA, 21 bp, synthetic construct
  source 1..21: mol_type = other DNA
attactcctgggagtgttccg

SEQ ID NO: 11514 - DNA, 21 bp, synthetic construct
  source 1..21: mol_type = other DNA
acattcacctctagcgtctct

SEQ ID NO: 11515 - RNA, 21 nt, synthetic construct
  source 1..21: mol_type = other RNA
  ncRNA 1..21: ncRNA_class = other; note = mRNA
gttctccacctcgaacaacct

SEQ ID NO: 11516 - DNA, 21 bp, synthetic construct
  source 1..21: mol_type = other DNA
ttgccgaggggggagggtgct

SEQ ID NO: 11517 - DNA, 21 bp, synthetic construct
  source 1..21: mol_type = other DNA
ctgccgaggggggggggtgct

SEQ ID NO: 11518 - DNA, 21 bp, synthetic construct
  source 1..21: mol_type = other DNA
gattcttctgctcctcgtgct

SEQ ID NO: 11519 - DNA, 21 bp, synthetic construct
  source 1..21: mol_type = other DNA
ttgagcggcggaacccttgac

SEQ ID NO: 11520 - DNA, 21 bp, synthetic construct
  source 1..21: mol_type = other DNA
catggggcgtcggttccgagt

SEQ ID NO: 11521 - DNA, 21 bp, synthetic construct
  source 1..21: mol_type = other DNA
atgaggaatacggtggcttct

SEQ ID NO: 11522 - DNA, 21 bp, synthetic construct
  source 1..21: mol_type = other DNA
tcggtttttacgattcagggt

SEQ ID NO: 11523 - RNA, 21 nt, synthetic construct
  source 1..21: mol_type = other RNA
  ncRNA 1..21: ncRNA_class = other; note = mRNA
gttaagcctaattcttcggct

SEQ ID NO: 11524 - DNA, 21 bp, synthetic construct
  source 1..21: mol_type = other DNA
tacctctcaagaatgaacgcc

SEQ ID NO: 11525 - DNA, 21 bp, synthetic construct
  source 1..21: mol_type = other DNA
gggctgattaagaatgctact

SEQ ID NO: 11526 - DNA, 21 bp, synthetic construct
  source 1..21: mol_type = other DNA
gggcttattggtccttcgggg

SEQ ID NO: 11527 - RNA, 21 nt, synthetic construct
  source 1..21: mol_type = other RNA
  ncRNA 1..21: ncRNA_class = other; note = mRNA
actcgtgttgctgatacggat

SEQ ID NO: 11528 - DNA, 21 bp, synthetic construct
  source 1..21: mol_type = other DNA
accggcggcgtcggggtaatg

SEQ ID NO: 11529 - DNA, 21 bp, synthetic construct
  source 1..21: mol_type = other DNA
gagcggctgagtgataagggt

SEQ ID NO: 11530 - DNA, 21 bp, synthetic construct
  source 1..21: mol_type = other DNA
atcatggggcaaggcgacgga

SEQ ID NO: 11531 - RNA, 21 nt, synthetic construct
  source 1..21: mol_type = other RNA
  ncRNA 1..21: ncRNA_class = other; note = mRNA
agaagcggctacgtcaccgcg

SEQ ID NO: 11532 - RNA, 21 nt, synthetic construct
  source 1..21: mol_type = other RNA
  ncRNA 1..21: ncRNA_class = other; note = mRNA
attatgtctcagggtcggagt

SEQ ID NO: 11533 - DNA, 21 bp, synthetic construct
  source 1..21: mol_type = other DNA
cacgaaaaagtcgggccattg

SEQ ID NO: 11534 - DNA, 21 bp, synthetic construct
  source 1..21: mol_type = other DNA
atgcgagcgacggactcacct

SEQ ID NO: 11535 - DNA, 21 bp, synthetic construct
  source 1..21: mol_type = other DNA
ctgaccggtagcgcctactct

SEQ ID NO: 11536 - DNA, 21 bp, synthetic construct
  source 1..21: mol_type = other DNA
gctaattctggtgttcattcg

SEQ ID NO: 11537 - DNA, 21 bp, synthetic construct
  source 1..21: mol_type = other DNA
tttcatggttcttctactgcg

SEQ ID NO: 11538 - RNA, 21 nt, synthetic construct
  source 1..21: mol_type = other RNA
  ncRNA 1..21: ncRNA_class = other; note = mRNA
gggggggttggtgctgtgatt

SEQ ID NO: 11539 - DNA, 21 bp, synthetic construct
  source 1..21: mol_type = other DNA
agtagtattccgtctcaggcg

SEQ ID NO: 11540 - RNA, 21 nt, synthetic construct
  source 1..21: mol_type = other RNA
  ncRNA 1..21: ncRNA_class = other; note = mRNA
ggggttatgacatcgatgcct

SEQ ID NO: 11541 - DNA, 21 bp, synthetic construct
  source 1..21: mol_type = other DNA
caatcaaacgtagtccgaggc

SEQ ID NO: 11542 - DNA, 21 bp, synthetic construct
  source 1..21: mol_type = other DNA
ttttctcagtcgtcgtctagg

SEQ ID NO: 11543 - DNA, 21 bp, synthetic construct
  source 1..21: mol_type = other DNA
tccgtcaacacaggcggccaa

SEQ ID NO: 11544 - DNA, 21 bp, synthetic construct
  source 1..21: mol_type = other DNA
ccatccgacagcctcgtacgt

SEQ ID NO: 11545 - DNA, 21 bp, synthetic construct
  source 1..21: mol_type = other DNA
ttggctgggcgggatgtgatg

SEQ ID NO: 11546 - DNA, 21 bp, synthetic construct
  source 1..21: mol_type = other DNA
gtcaacagtccaacagtacgg

SEQ ID NO: 11547 - DNA, 21 bp, synthetic construct
  source 1..21: mol_type = other DNA
ttcagcagccaacccccctcc

SEQ ID NO: 11548 - DNA, 21 bp, synthetic construct
  source 1..21: mol_type = other DNA
aacctacgttccgctgaaaac

SEQ ID NO: 11549 - DNA, 21 bp, synthetic construct
  source 1..21: mol_type = other DNA
cttaaggggatggttgggcct

SEQ ID NO: 11550 - DNA, 21 bp, synthetic construct
  source 1..21: mol_type = other DNA
caggggggggttgcggagccg

SEQ ID NO: 11551 - DNA, 21 bp, synthetic construct
  source 1..21: mol_type = other DNA
actgttggtcaggctcgtact

SEQ ID NO: 11552 - DNA, 21 bp, synthetic construct
  source 1..21: mol_type = other DNA
ggtcagaggtctgatgtttat

SEQ ID NO: 11553 - DNA, 21 bp, synthetic construct
  source 1..21: mol_type = other DNA
ggccaagcactggaacggagt

SEQ ID NO: 11554 - DNA, 21 bp, synthetic construct
  source 1..21: mol_type = other DNA
ttgaatcaggggtcgagtccg

SEQ ID NO: 11555 - DNA, 21 bp, synthetic construct
  source 1..21: mol_type = other DNA
acagtgggcgttactggacac

SEQ ID NO: 11556 - DNA, 21 bp, synthetic construct
  source 1..21: mol_type = other DNA
gggcttaatactccgagggat

SEQ ID NO: 11557 - DNA, 21 bp, synthetic construct
  source 1..21: mol_type = other DNA
attgtgcaggtggctcctgct

SEQ ID NO: 11558 - DNA, 21 bp, synthetic construct
  source 1..21: mol_type = other DNA
agtagtcagcttattactggt

SEQ ID NO: 11559 - DNA, 21 bp, synthetic construct
  source 1..21: mol_type = other DNA
ttgcgttctgttcctttgggt

SEQ ID NO: 11560 - DNA, 21 bp, synthetic construct
  source 1..21: mol_type = other DNA
ggtaggcgtgaggggttttcg

SEQ ID NO: 11561 - RNA, 21 nt, synthetic construct
  source 1..21: mol_type = other RNA
  ncRNA 1..21: ncRNA_class = other; note = mRNA
cgctcggtatcccccacttca

SEQ ID NO: 11562 - DNA, 21 bp, synthetic construct
  source 1..21: mol_type = other DNA
caggttcatagtccggctggt

SEQ ID NO: 11563 - DNA, 21 bp, synthetic construct
  source 1..21: mol_type = other DNA
ggctcaggcgggggccctaca

SEQ ID NO: 11564 - RNA, 21 nt, synthetic construct
  source 1..21: mol_type = other RNA
  ncRNA 1..21: ncRNA_class = other; note = mRNA
cttgttgcacgaagtgacctc

SEQ ID NO: 11565 - RNA, 21 nt, synthetic construct
  source 1..21: mol_type = other RNA
  ncRNA 1..21: ncRNA_class = other; note = mRNA
tcggttttgatggggaaggct

SEQ ID NO: 11566 - DNA, 21 bp, synthetic construct
  source 1..21: mol_type = other DNA
ggtgctcgcaacacccttacg

SEQ ID NO: 11567 - RNA, 21 nt, synthetic construct
  source 1..21: mol_type = other RNA
  ncRNA 1..21: ncRNA_class = other; note = mRNA
ctaagaggtttaggaacaggc

SEQ ID NO: 11568 - DNA, 21 bp, synthetic construct
  source 1..21: mol_type = other DNA
caaggcatgcaagggacgcgg

SEQ ID NO: 11569 - DNA, 21 bp, synthetic construct
  source 1..21: mol_type = other DNA
gcacgtttaggcagcacaacc

SEQ ID NO: 11570 - RNA, 21 nt, synthetic construct
  source 1..21: mol_type = other RNA
  ncRNA 1..21: ncRNA_class = other; note = mRNA
gctacacgaatgcacgtggga

SEQ ID NO: 11571 - DNA, 21 bp, synthetic construct
  source 1..21: mol_type = other DNA
gctataaaaggcataggagcg

SEQ ID NO: 11572 - DNA, 21 bp, synthetic construct
  source 1..21: mol_type = other DNA
gtactcggggtggaccgatcg

SEQ ID NO: 11573 - RNA, 21 nt, synthetic construct
  source 1..21: mol_type = other RNA
  ncRNA 1..21: ncRNA_class = other; note = mRNA
agggagtctacttctgttgat

SEQ ID NO: 11574 - DNA, 21 bp, synthetic construct
  source 1..21: mol_type = other DNA
tctaatcagtctacgagtcgg

SEQ ID NO: 11575 - DNA, 21 bp, synthetic construct
  source 1..21: mol_type = other DNA
atagtctccgccgaacgcgcg

SEQ ID NO: 11576 - RNA, 21 nt, synthetic construct
  source 1..21: mol_type = other RNA
  ncRNA 1..21: ncRNA_class = other; note = mRNA
gtacttcacttagcacaacca

SEQ ID NO: 11577 - RNA, 21 nt, synthetic construct
  source 1..21: mol_type = other RNA
  ncRNA 1..21: ncRNA_class = other; note = mRNA
gacaaaggggtaatgggctac

SEQ ID NO: 11578 - DNA, 21 bp, synthetic construct
  source 1..21: mol_type = other DNA
ggtccggccggggtcacacgc

SEQ ID NO: 11579 - DNA, 21 bp, synthetic construct
  source 1..21: mol_type = other DNA
cgtttgttggggaataatgat

SEQ ID NO: 11580 - DNA, 21 bp, synthetic construct
  source 1..21: mol_type = other DNA
acttttgatgctaggggtggt

SEQ ID NO: 11581 - RNA, 21 nt, synthetic construct
  source 1..21: mol_type = other RNA
  ncRNA 1..21: ncRNA_class = other; note = mRNA
atcatgtcgcaagggttgtca

SEQ ID NO: 11582 - DNA, 21 bp, synthetic construct
  source 1..21: mol_type = other DNA
attactgctactgtggtgact

SEQ ID NO: 11583 - RNA, 21 nt, synthetic construct
  source 1..21: mol_type = other RNA
  ncRNA 1..21: ncRNA_class = other; note = mRNA
tctatgagtcatcatgttgcg

SEQ ID NO: 11584 - DNA, 21 bp, synthetic construct
  source 1..21: mol_type = other DNA
ggtgtgcgtactgcggaggct

SEQ ID NO: 11585 - RNA, 21 nt, synthetic construct
  source 1..21: mol_type = other RNA
  ncRNA 1..21: ncRNA_class = other; note = mRNA
gaccgtggagtcatgggttac

SEQ ID NO: 11586 - DNA, 21 bp, synthetic construct
  source 1..21: mol_type = other DNA
gggcgcgacggggctatacca

SEQ ID NO: 11587 - DNA, 21 bp, synthetic construct
  source 1..21: mol_type = other DNA
gtgcagcgtttgcaggttccg

SEQ ID NO: 11588 - DNA, 21 bp, synthetic construct
  source 1..21: mol_type = other DNA
ggggaacacgccggccgtcct

SEQ ID NO: 11589 - DNA, 21 bp, synthetic construct
  source 1..21: mol_type = other DNA
ggtcctagtcgtgctgtgggt

SEQ ID NO: 11590 - DNA, 21 bp, synthetic construct
  source 1..21: mol_type = other DNA
actcgtagtgcgtctgatgag

SEQ ID NO: 11591 - RNA, 21 nt, synthetic construct
  source 1..21: mol_type = other RNA
  ncRNA 1..21: ncRNA_class = other; note = mRNA
tacatggacaccgaatcaatg

SEQ ID NO: 11592 - DNA, 21 bp, synthetic construct
  source 1..21: mol_type = other DNA
cagactttggggcagatttct

SEQ ID NO: 11593 - DNA, 21 bp, synthetic construct
  source 1..21: mol_type = other DNA
agtttgcgtgtgactgagcgg

SEQ ID NO: 11594 - RNA, 21 nt, synthetic construct
  source 1..21: mol_type = other RNA
  ncRNA 1..21: ncRNA_class = other; note = mRNA
attaattctgtgcatagtgcg

SEQ ID NO: 11595 - RNA, 21 nt, synthetic construct
  source 1..21: mol_type = other RNA
  ncRNA 1..21: ncRNA_class = other; note = mRNA
tggccgaagactgttgatgtt

SEQ ID NO: 11596 - DNA, 21 bp, synthetic construct
  source 1..21: mol_type = other DNA
gttgggtcggttgcgtctgcg

SEQ ID NO: 11597 - DNA, 21 bp, synthetic construct
  source 1..21: mol_type = other DNA
ggattggttgttcccgccggt

SEQ ID NO: 11598 - DNA, 21 bp, synthetic construct
  source 1..21: mol_type = other DNA
tacgtcagcaccgtagacctc

SEQ ID NO: 11599 - RNA, 21 nt, synthetic construct
  source 1..21: mol_type = other RNA
  ncRNA 1..21: ncRNA_class = other; note = mRNA
ttgagaggtttatccaacggc

SEQ ID NO: 11600 - DNA, 21 bp, synthetic construct
  source 1..21: mol_type = other DNA
gtactagacgttcgcctgggg

SEQ ID NO: 11601 - DNA, 21 bp, synthetic construct
  source 1..21: mol_type = other DNA
cttaagaatgctactattagt

SEQ ID NO: 11602 - DNA, 21 bp, synthetic construct
  source 1..21: mol_type = other DNA
cattcgtctttggctggttcg

SEQ ID NO: 11603 - DNA, 21 bp, synthetic construct
  source 1..21: mol_type = other DNA
tacggtaaagtaggaccaata

SEQ ID NO: 11604 - DNA, 21 bp, synthetic construct
  source 1..21: mol_type = other DNA
acaagcgccaaacacactcct

SEQ ID NO: 11605 - DNA, 21 bp, synthetic construct
  source 1..21: mol_type = other DNA
gtagcaggcaacgcggttcta

SEQ ID NO: 11606 - DNA, 21 bp, synthetic construct
  source 1..21: mol_type = other DNA
gggtcttctggggctcatttg

SEQ ID NO: 11607 - DNA, 21 bp, synthetic construct
  source 1..21: mol_type = other DNA
aatgggatgagtgggaatggt

SEQ ID NO: 11608 - RNA, 21 nt, synthetic construct
  source 1..21: mol_type = other RNA
  ncRNA 1..21: ncRNA_class = other; note = mRNA
cttgattctcggaagagttcg

SEQ ID NO: 11609 - RNA, 21 nt, synthetic construct
  source 1..21: mol_type = other RNA
  ncRNA 1..21: ncRNA_class = other; note = mRNA
aggagtgggtttgtgtcggct

SEQ ID NO: 11610 - DNA, 21 bp, synthetic construct
  source 1..21: mol_type = other DNA
tcgaggtattctgctgtgccg

SEQ ID NO: 11611 - DNA, 21 bp, synthetic construct
  source 1..21: mol_type = other DNA
ctgcgtggtccggttaatggt

SEQ ID NO: 11612 - DNA, 21 bp, synthetic construct
  source 1..21: mol_type = other DNA
caacacctacctacatcgggg

SEQ ID NO: 11613 - DNA, 21 bp, synthetic construct
  source 1..21: mol_type = other DNA
ggtgggcgggtcgtgtctggc

SEQ ID NO: 11614 - DNA, 21 bp, synthetic construct
  source 1..21: mol_type = other DNA
gaaggacgcataagctacgcc

SEQ ID NO: 11615 - DNA, 21 bp, synthetic construct
  source 1..21: mol_type = other DNA
cgagtagacagttcgggaggc

SEQ ID NO: 11616 - DNA, 21 bp, synthetic construct
  source 1..21: mol_type = other DNA
tctaatcggatgacggggcct

SEQ ID NO: 11617 - DNA, 21 bp, synthetic construct
  source 1..21: mol_type = other DNA
atgggaagacaagggcttggg

SEQ ID NO: 11618 - RNA, 21 nt, synthetic construct
  source 1..21: mol_type = other RNA
  ncRNA 1..21: ncRNA_class = other; note = mRNA
ggtcttacttcggttattctt

SEQ ID NO: 11619 - DNA, 21 bp, synthetic construct
  source 1..21: mol_type = other DNA
aatatgtcgggtggttctcgt

SEQ ID NO: 11620 - DNA, 21 bp, synthetic construct
  source 1..21: mol_type = other DNA
ttcgtagcttccggtgtctcg

SEQ ID NO: 11621 - DNA, 21 bp, synthetic construct
  source 1..21: mol_type = other DNA
caagtcagacacatgctggaa

SEQ ID NO: 11622 - DNA, 21 bp, synthetic construct
  source 1..21: mol_type = other DNA
ttgcataattcgatgcctggg

SEQ ID NO: 11623 - DNA, 21 bp, synthetic construct
  source 1..21: mol_type = other DNA
acggttcctggggaggttgcg

SEQ ID NO: 11624 - DNA, 21 bp, synthetic construct
  source 1..21: mol_type = other DNA
tcaaaaaccgccgtattgaca

SEQ ID NO: 11625 - DNA, 21 bp, synthetic construct
  source 1..21: mol_type = other DNA
ttgactgggagtcctcctatg

SEQ ID NO: 11626 - RNA, 21 nt, synthetic construct
  source 1..21: mol_type = other RNA
  ncRNA 1..21: ncRNA_class = other; note = mRNA
tcagacgtgcaaagagtgact

SEQ ID NO: 11627 - DNA, 21 bp, synthetic construct
  source 1..21: mol_type = other DNA
gctgtttcgggggtgccgcgt

SEQ ID NO: 11628 - DNA, 21 bp, synthetic construct
  source 1..21: mol_type = other DNA
ggtcttacgtctcagcctcct

SEQ ID NO: 11629 - RNA, 21 nt, synthetic construct
  source 1..21: mol_type = other RNA
  ncRNA 1..21: ncRNA_class = other; note = mRNA
gctgggcattatggtactagt

SEQ ID NO: 11630 - DNA, 21 bp, synthetic construct
  source 1..21: mol_type = other DNA
accatccgccacacgaacggg

SEQ ID NO: 11631 - RNA, 21 nt, synthetic construct
  source 1..21: mol_type = other RNA
  ncRNA 1..21: ncRNA_class = other; note = mRNA
ctcgtcatgtcggaccgcccc

SEQ ID NO: 11632 - DNA, 21 bp, synthetic construct
  source 1..21: mol_type = other DNA
ggcaacggagttatctctggt

SEQ ID NO: 11633 - DNA, 21 bp, synthetic construct
  source 1..21: mol_type = other DNA
agggcggatgcgacgaagtcg

SEQ ID NO: 11634 - DNA, 21 bp, synthetic construct
  source 1..21: mol_type = other DNA
ttgcggggtgatggtagtacg

SEQ ID NO: 11635 - DNA, 21 bp, synthetic construct
  source 1..21: mol_type = other DNA
aagatgactagtgagtctagg

SEQ ID NO: 11636 - DNA, 21 bp, synthetic construct
  source 1..21: mol_type = other DNA
ttctcccaatctcccagctcg

SEQ ID NO: 11637 - DNA, 21 bp, synthetic construct
  source 1..21: mol_type = other DNA
gaaaaaggattctccgtcgct

SEQ ID NO: 11638 - DNA, 21 bp, synthetic construct
  source 1..21: mol_type = other DNA
catgatcgggggacggcggct

SEQ ID NO: 11639 - RNA, 21 nt, synthetic construct
  source 1..21: mol_type = other RNA
  ncRNA 1..21: ncRNA_class = other; note = mRNA
acgaatggtgcgtcgacttat

SEQ ID NO: 11640 - RNA, 21 nt, synthetic construct
  source 1..21: mol_type = other RNA
  ncRNA 1..21: ncRNA_class = other; note = mRNA
ccagacagcggtaaaagctcc

SEQ ID NO: 11641 - DNA, 21 bp, synthetic construct
  source 1..21: mol_type = other DNA
ggtcaatcgcggtacggtagt

SEQ ID NO: 11642 - DNA, 21 bp, synthetic construct
  source 1..21: mol_type = other DNA
aagctggagtttgcgacgggg

SEQ ID NO: 11643 - DNA, 21 bp, synthetic construct
  source 1..21: mol_type = other DNA
tttgtggctaatcgtgggcag

SEQ ID NO: 11644 - DNA, 21 bp, synthetic construct
  source 1..21: mol_type = other DNA
agtgcttatcaggcgcagctt

SEQ ID NO: 11645 - DNA, 21 bp, synthetic construct
  source 1..21: mol_type = other DNA
tactcggatggacccggttca

SEQ ID NO: 11646 - DNA, 21 bp, synthetic construct
  source 1..21: mol_type = other DNA
cttggggggttgagtacgcct

SEQ ID NO: 11647 - RNA, 21 nt, synthetic construct
  source 1..21: mol_type = other RNA
  ncRNA 1..21: ncRNA_class = other; note = mRNA
cttaatgggggtaggtctacg

SEQ ID NO: 11648 - DNA, 21 bp, synthetic construct
  source 1..21: mol_type = other DNA
cctgggtctagtcatatgggg

SEQ ID NO: 11649 - RNA, 21 nt, synthetic construct
  source 1..21: mol_type = other RNA
  ncRNA 1..21: ncRNA_class = other; note = mRNA
aggcaatccagcctggtagtg

SEQ ID NO: 11650 - DNA, 21 bp, synthetic construct
  source 1..21: mol_type = other DNA
actcgtagtgtgacctacccc

SEQ ID NO: 11651 - DNA, 21 bp, synthetic construct
  source 1..21: mol_type = other DNA
gtctccgccgctgctgggacc

SEQ ID NO: 11652 - DNA, 21 bp, synthetic construct
  source 1..21: mol_type = other DNA
cacggagtcatagtcacagtt

SEQ ID NO: 11653 - DNA, 21 bp, synthetic construct
  source 1..21: mol_type = other DNA
tacgtcaggaccgtagacatc

SEQ ID NO: 11654 - DNA, 21 bp, synthetic construct
  source 1..21: mol_type = other DNA
tcagtatcgtctctcggattg

SEQ ID NO: 11655 - DNA, 21 bp, synthetic construct
  source 1..21: mol_type = other DNA
tctcagggtgtgccgcgttcg

SEQ ID NO: 11656 - RNA, 21 nt, synthetic construct
  source 1..21: mol_type = other RNA
  ncRNA 1..21: ncRNA_class = other; note = mRNA
gcctgggcaaacgtaagctcg

SEQ ID NO: 11657 - DNA, 21 bp, synthetic construct
  source 1..21: mol_type = other DNA
cgcatggacaacaaacaagga

SEQ ID NO: 11658 - DNA, 21 bp, synthetic construct
  source 1..21: mol_type = other DNA
cccgcaaaacacactacaagt

SEQ ID NO: 11659 - RNA, 21 nt, synthetic construct
  source 1..21: mol_type = other RNA
  ncRNA 1..21: ncRNA_class = other; note = mRNA
ggggagattcggctgagtcct

SEQ ID NO: 11660 - DNA, 21 bp, synthetic construct
  source 1..21: mol_type = other DNA
acagggcacgtcgtagacggc

SEQ ID NO: 11661 - DNA, 21 bp, synthetic construct
  source 1..21: mol_type = other DNA
gagaggactccgcttctgctg

SEQ ID NO: 11662 - DNA, 21 bp, synthetic construct
  source 1..21: mol_type = other DNA
cgatcacaaaacggaggtttc

SEQ ID NO: 11663 - DNA, 21 bp, synthetic construct
  source 1..21: mol_type = other DNA
tcggatggtgctcaggttggt

SEQ ID NO: 11664 - DNA, 21 bp, synthetic construct
  source 1..21: mol_type = other DNA
gtagaccaccacttcaccggc

SEQ ID NO: 11665 - DNA, 21 bp, synthetic construct
  source 1..21: mol_type = other DNA
cgggtgcctgtttcgcaggtg

SEQ ID NO: 11666 - DNA, 21 bp, synthetic construct
  source 1..21: mol_type = other DNA
agtccgtcttctcgtggtggg

SEQ ID NO: 11667 - DNA, 21 bp, synthetic construct
  source 1..21: mol_type = other DNA
ttgaagagtgcttatatgtcg

SEQ ID NO: 11668 - RNA, 21 nt, synthetic construct
  source 1..21: mol_type = other RNA
  ncRNA 1..21: ncRNA_class = other; note = mRNA
gttatgcgtgataattatggt

SEQ ID NO: 11669 - RNA, 21 nt, synthetic construct
  source 1..21: mol_type = other RNA
  ncRNA 1..21: ncRNA_class = other; note = mRNA
atgggtgcgcagctgcggatg

SEQ ID NO: 11670 - DNA, 21 bp, synthetic construct
  source 1..21: mol_type = other DNA
gtagtaaaaggattcagtaac

SEQ ID NO: 11671 - DNA, 21 bp, synthetic construct
  source 1..21: mol_type = other DNA
actgaccgatccatggtcgct

SEQ ID NO: 11672 - DNA, 21 bp, synthetic construct
  source 1..21: mol_type = other DNA
gtgaatgctgctagtttgatg

SEQ ID NO: 11673 - DNA, 21 bp, synthetic construct
  source 1..21: mol_type = other DNA
acgcgagttatcaactccagc

SEQ ID NO: 11674 - DNA, 21 bp, synthetic construct
  source 1..21: mol_type = other DNA
ggaaaaggcttctcgccaaac

SEQ ID NO: 11675 - DNA, 21 bp, synthetic construct
  source 1..21: mol_type = other DNA
gcagtatcagggggtcgaccg

SEQ ID NO: 11676 - DNA, 21 bp, synthetic construct
  source 1..21: mol_type = other DNA
aacgttttctcctcaaacggc

SEQ ID NO: 11677 - RNA, 21 nt, synthetic construct
  source 1..21: mol_type = other RNA
  ncRNA 1..21: ncRNA_class = other; note = mRNA
ctagtggtccgcgaaccaatg

SEQ ID NO: 11678 - DNA, 21 bp, synthetic construct
  source 1..21: mol_type = other DNA
gattcggggcatagtcatagt

SEQ ID NO: 11679 - DNA, 21 bp, synthetic construct
  source 1..21: mol_type = other DNA
cctgttcgtgatgcgtattct

SEQ ID NO: 11680 - DNA, 21 bp, synthetic construct
  source 1..21: mol_type = other DNA
attggtcgtgtggtttcgagt

SEQ ID NO: 11681 - DNA, 21 bp, synthetic construct
  source 1..21: mol_type = other DNA
agctcggtaatcctggaaacg

SEQ ID NO: 11682 - RNA, 21 nt, synthetic construct
  source 1..21: mol_type = other RNA
  ncRNA 1..21: ncRNA_class = other; note = mRNA
gtaatacgagtaggaacggcc

SEQ ID NO: 11683 - DNA, 21 bp, synthetic construct
  source 1..21: mol_type = other DNA
agtgctgggctggttactctt

SEQ ID NO: 11684 - DNA, 21 bp, synthetic construct
  source 1..21: mol_type = other DNA
agtttgggttcgagtatttct

SEQ ID NO: 11685 - DNA, 21 bp, synthetic construct
  source 1..21: mol_type = other DNA
gtgcaacgcgttctacccaac

SEQ ID NO: 11686 - DNA, 21 bp, synthetic construct
  source 1..21: mol_type = other DNA
gcgggggcgcggattccgctg

SEQ ID NO: 11687 - DNA, 21 bp, synthetic construct
  source 1..21: mol_type = other DNA
agtcggcctggcgtagaagtg

SEQ ID NO: 11688 - DNA, 21 bp, synthetic construct
  source 1..21: mol_type = other DNA
caaccacgcgacgtatctcgt

SEQ ID NO: 11689 - DNA, 21 bp, synthetic construct
  source 1..21: mol_type = other DNA
ggaggcacaaaaaccatctct

SEQ ID NO: 11690 - DNA, 21 bp, synthetic construct
  source 1..21: mol_type = other DNA
tcggctgggttgcgtatgact

SEQ ID NO: 11691 - DNA, 21 bp, synthetic construct
  source 1..21: mol_type = other DNA
aagcaggagtatagtactggt

SEQ ID NO: 11692 - DNA, 21 bp, synthetic construct
  source 1..21: mol_type = other DNA
attggtcgtatgagtggtaat

SEQ ID NO: 11693 - DNA, 21 bp, synthetic construct
  source 1..21: mol_type = other DNA
ggcacatacgtcggccaatca

SEQ ID NO: 11694 - DNA, 21 bp, synthetic construct
  source 1..21: mol_type = other DNA
acacacgccactaaatcaggc

SEQ ID NO: 11695 - DNA, 21 bp, synthetic construct
  source 1..21: mol_type = other DNA
aatgcgatttcgagtaggagt

SEQ ID NO: 11696 - DNA, 21 bp, synthetic construct
  source 1..21: mol_type = other DNA
ggtatttctggtgttcattcg

SEQ ID NO: 11697 - RNA, 21 nt, synthetic construct
  source 1..21: mol_type = other RNA
  ncRNA 1..21: ncRNA_class = other; note = mRNA
cttcggtcggatgatgtgcgt

SEQ ID NO: 11698 - DNA, 21 bp, synthetic construct
  source 1..21: mol_type = other DNA
tctttgggcaaagcatccgcc

SEQ ID NO: 11699 - DNA, 21 bp, synthetic construct
  source 1..21: mol_type = other DNA
caatcaaaagtcgtaggcggc

SEQ ID NO: 11700 - DNA, 21 bp, synthetic construct
  source 1..21: mol_type = other DNA
gtcgggttaggctcatctgcg

SEQ ID NO: 11701 - DNA, 21 bp, synthetic construct
  source 1..21: mol_type = other DNA
tcagtaagagttgggcccacc

SEQ ID NO: 11702 - DNA, 21 bp, synthetic construct
  source 1..21: mol_type = other DNA
gtcgcccgggaacttggcagc

SEQ ID NO: 11703 - DNA, 21 bp, synthetic construct
  source 1..21: mol_type = other DNA
tctcgtccgaatgatggtgct

SEQ ID NO: 11704 - DNA, 21 bp, synthetic construct
  source 1..21: mol_type = other DNA
gtcgcggtccgtgccctcgca

SEQ ID NO: 11705 - DNA, 21 bp, synthetic construct
  source 1..21: mol_type = other DNA
aactcggttggacccggttca

SEQ ID NO: 11706 - RNA, 21 nt, synthetic construct
  source 1..21: mol_type = other RNA
  ncRNA 1..21: ncRNA_class = other; note = mRNA
gcggtgagcggcgtccaacgc

SEQ ID NO: 11707 - DNA, 21 bp, synthetic construct
  source 1..21: mol_type = other DNA
cgacacgcctccatcgacatc

SEQ ID NO: 11708 - DNA, 21 bp, synthetic construct
  source 1..21: mol_type = other DNA
tccgcacgcaccggtaccttc

SEQ ID NO: 11709 - RNA, 21 nt, synthetic construct
  source 1..21: mol_type = other RNA
  ncRNA 1..21: ncRNA_class = other; note = mRNA
cgtacgggggttattacggct

SEQ ID NO: 11710 - DNA, 21 bp, synthetic construct
  source 1..21: mol_type = other DNA
gcgagggagattgggccgaat

SEQ ID NO: 11711 - DNA, 21 bp, synthetic construct
  source 1..21: mol_type = other DNA
gttcggtctcttatggcggat

SEQ ID NO: 11712 - DNA, 21 bp, synthetic construct
  source 1..21: mol_type = other DNA
cgctccggcatacaaagttcg

SEQ ID NO: 11713 - DNA, 21 bp, synthetic construct
  source 1..21: mol_type = other DNA
gacaccgtccgcggccccata

SEQ ID NO: 11714 - DNA, 21 bp, synthetic construct
  source 1..21: mol_type = other DNA
cttggagtcaaactcagttca

SEQ ID NO: 11715 - DNA, 21 bp, synthetic construct
  source 1..21: mol_type = other DNA
gttatggttaagcagtcgggg

SEQ ID NO: 11716 - DNA, 21 bp, synthetic construct
  source 1..21: mol_type = other DNA
cgcggaagcggatccatcgcg

SEQ ID NO: 11717 - DNA, 21 bp, synthetic construct
  source 1..21: mol_type = other DNA
atgaacatgcctaacacggtt

SEQ ID NO: 11718 - DNA, 21 bp, synthetic construct
  source 1..21: mol_type = other DNA
ggtaggagtgctgatttgcct

SEQ ID NO: 11719 - DNA, 21 bp, synthetic construct
  source 1..21: mol_type = other DNA
ttacccatgtccaacaaagcc

SEQ ID NO: 11720 - DNA, 21 bp, synthetic construct
  source 1..21: mol_type = other DNA
atgttgggggctgtgacttct

SEQ ID NO: 11721 - DNA, 21 bp, synthetic construct
  source 1..21: mol_type = other DNA
aaatcaggcgacaacacggct

SEQ ID NO: 11722 - DNA, 21 bp, synthetic construct
  source 1..21: mol_type = other DNA
cctgctttgtcgaaggggggt

SEQ ID NO: 11723 - DNA, 21 bp, synthetic construct
  source 1..21: mol_type = other DNA
agtgatggttcgtataaggtg

SEQ ID NO: 11724 - DNA, 21 bp, synthetic construct
  source 1..21: mol_type = other DNA
accggcggccttggagtcacc

SEQ ID NO: 11725 - DNA, 21 bp, synthetic construct
  source 1..21: mol_type = other DNA
gcgggaaccacccaatctaga

SEQ ID NO: 11726 - DNA, 21 bp, synthetic construct
  source 1..21: mol_type = other DNA
atgggtgctcagggggtgagg

SEQ ID NO: 11727 - DNA, 21 bp, synthetic construct
  source 1..21: mol_type = other DNA
gtcggaacgagcaggggagcc

SEQ ID NO: 11728 - DNA, 21 bp, synthetic construct
  source 1..21: mol_type = other DNA
gaacaacacatcgtcgcatct

SEQ ID NO: 11729 - DNA, 21 bp, synthetic construct
  source 1..21: mol_type = other DNA
catttttctgagattaggcct

SEQ ID NO: 11730 - RNA, 21 nt, synthetic construct
  source 1..21: mol_type = other RNA
  ncRNA 1..21: ncRNA_class = other; note = mRNA
ggtagtagtgggtctttgagg

SEQ ID NO: 11731 - DNA, 21 bp, synthetic construct
  source 1..21: mol_type = other DNA
gtgggtgcatcccgggcctct

SEQ ID NO: 11732 - DNA, 21 bp, synthetic construct
  source 1..21: mol_type = other DNA
caatctaggaccttggcagcg

SEQ ID NO: 11733 - RNA, 21 nt, synthetic construct
  source 1..21: mol_type = other RNA
  ncRNA 1..21: ncRNA_class = other; note = mRNA
ctccgatctgacggggtccgg

SEQ ID NO: 11734 - DNA, 21 bp, synthetic construct
  source 1..21: mol_type = other DNA
attagtcgttctgagattgct

SEQ ID NO: 11735 - DNA, 21 bp, synthetic construct
  source 1..21: mol_type = other DNA
tcgcagaggaatgtttcgagt

SEQ ID NO: 11736 - DNA, 21 bp, synthetic construct
  source 1..21: mol_type = other DNA
acgcacgacaggggtggcact

SEQ ID NO: 11737 - RNA, 21 nt, synthetic construct
  source 1..21: mol_type = other RNA
  ncRNA 1..21: ncRNA_class = other; note = mRNA
caaggaatctcatacgcagct

SEQ ID NO: 11738 - DNA, 21 bp, synthetic construct
  source 1..21: mol_type = other DNA
agtactgagaggaagggtccg

SEQ ID NO: 11739 - DNA, 21 bp, synthetic construct
  source 1..21: mol_type = other DNA
cgtggtgatacggttggggat

SEQ ID NO: 11740 - DNA, 21 bp, synthetic construct
  source 1..21: mol_type = other DNA
atgccttctgtccaaggagtt

SEQ ID NO: 11741 - DNA, 21 bp, synthetic construct
  source 1..21: mol_type = other DNA
ccggagtctaaggcttcggct

SEQ ID NO: 11742 - DNA, 21 bp, synthetic construct
  source 1..21: mol_type = other DNA
atgggtgacccacggatgatg

SEQ ID NO: 11743 - DNA, 21 bp, synthetic construct
  source 1..21: mol_type = other DNA
ggcgtaacataccaaacgcga

SEQ ID NO: 11744 - DNA, 21 bp, synthetic construct
  source 1..21: mol_type = other DNA
attgggaagtctactgctacg

SEQ ID NO: 11745 - RNA, 21 nt, synthetic construct
  source 1..21: mol_type = other RNA
  ncRNA 1..21: ncRNA_class = other; note = mRNA
aatgttgcgagttctcgggtg

SEQ ID NO: 11746 - DNA, 21 bp, synthetic construct
  source 1..21: mol_type = other DNA
gtccacgccgacggctcatta

SEQ ID NO: 11747 - DNA, 21 bp, synthetic construct
  source 1..21: mol_type = other DNA
gtcgggttcccactaaaaggc

SEQ ID NO: 11748 - DNA, 21 bp, synthetic construct
  source 1..21: mol_type = other DNA
acaggcggcggatccggaacc

SEQ ID NO: 11749 - DNA, 21 bp, synthetic construct
  source 1..21: mol_type = other DNA
tcgggtaatttgattgcttct

SEQ ID NO: 11750 - DNA, 21 bp, synthetic construct
  source 1..21: mol_type = other DNA
ctaaaagaaacatgggtagca

SEQ ID NO: 11751 - RNA, 21 nt, synthetic construct
  source 1..21: mol_type = other RNA
  ncRNA 1..21: ncRNA_class = other; note = mRNA
atcagatccgacggcgtacgg

SEQ ID NO: 11752 - RNA, 21 nt, synthetic construct
  source 1..21: mol_type = other RNA
  ncRNA 1..21: ncRNA_class = other; note = mRNA
gccgtcaacgcagtacctgga

SEQ ID NO: 11753 - RNA, 21 nt, synthetic construct
  source 1..21: mol_type = other RNA
  ncRNA 1..21: ncRNA_class = other; note = mRNA
catagtcggttgtctagttct

SEQ ID NO: 11754 - DNA, 21 bp, synthetic construct
  source 1..21: mol_type = other DNA
aacgctccgcgcgaaagtagc

SEQ ID NO: 11755 - DNA, 21 bp, synthetic construct
  source 1..21: mol_type = other DNA
ttcagaaacggcgttgcaggc

SEQ ID NO: 11756 - DNA, 21 bp, synthetic construct
  source 1..21: mol_type = other DNA
agagaaggaaactcgcgaaac

SEQ ID NO: 11757 - DNA, 21 bp, synthetic construct
  source 1..21: mol_type = other DNA
gacaaaaccgtaaccacattg

SEQ ID NO: 11758 - DNA, 21 bp, synthetic construct
  source 1..21: mol_type = other DNA
cgtagtatttcgggtgggact

SEQ ID NO: 11759 - DNA, 21 bp, synthetic construct
  source 1..21: mol_type = other DNA
agtaggttgccgattcatgag

SEQ ID NO: 11760 - DNA, 21 bp, synthetic construct
  source 1..21: mol_type = other DNA
atggaaaaagaagctagagcg

SEQ ID NO: 11761 - RNA, 21 nt, synthetic construct
  source 1..21: mol_type = other RNA
  ncRNA 1..21: ncRNA_class = other; note = mRNA
gctactgggactaaggctttt

SEQ ID NO: 11762 - RNA, 21 nt, synthetic construct
  source 1..21: mol_type = other RNA
  ncRNA 1..21: ncRNA_class = other; note = mRNA
aataattatgtgcatagtgcg

SEQ ID NO: 11763 - DNA, 21 bp, synthetic construct
  source 1..21: mol_type = other DNA
acagtacgctccacgacgata

SEQ ID NO: 11764 - DNA, 21 bp, synthetic construct
  source 1..21: mol_type = other DNA
actctggtgtctaggactggg

SEQ ID NO: 11765 - RNA, 21 nt, synthetic construct
  source 1..21: mol_type = other RNA
  ncRNA 1..21: ncRNA_class = other; note = mRNA
gggagggcggctgataatacg

SEQ ID NO: 11766 - DNA, 21 bp, synthetic construct
  source 1..21: mol_type = other DNA
gttaggggtattgatgttact

SEQ ID NO: 11767 - DNA, 21 bp, synthetic construct
  source 1..21: mol_type = other DNA
ctcggcatcagcggatcagtt

SEQ ID NO: 11768 - DNA, 21 bp, synthetic construct
  source 1..21: mol_type = other DNA
tacgtcaggaccctagacctc

SEQ ID NO: 11769 - DNA, 21 bp, synthetic construct
  source 1..21: mol_type = other DNA
ttcccgcgggggaacgtagcg

SEQ ID NO: 11770 - DNA, 21 bp, synthetic construct
  source 1..21: mol_type = other DNA
gagcgggggattccgggtgct

SEQ ID NO: 11771 - DNA, 21 bp, synthetic construct
  source 1..21: mol_type = other DNA
ctgagtgggcgggtgttggcg

SEQ ID NO: 11772 - DNA, 21 bp, synthetic construct
  source 1..21: mol_type = other DNA
ctggggaccaccgacggcggg

SEQ ID NO: 11773 - DNA, 21 bp, synthetic construct
  source 1..21: mol_type = other DNA
ttgggggcgcagaatgctcgg

SEQ ID NO: 11774 - DNA, 21 bp, synthetic construct
  source 1..21: mol_type = other DNA
actatgcatggggcgtctcat

SEQ ID NO: 11775 - DNA, 21 bp, synthetic construct
  source 1..21: mol_type = other DNA
tcagaaaaagtatccgtgacg

SEQ ID NO: 11776 - DNA, 21 bp, synthetic construct
  source 1..21: mol_type = other DNA
gctggtaatacgcagagtcag

SEQ ID NO: 11777 - DNA, 21 bp, synthetic construct
  source 1..21: mol_type = other DNA
tctagtcgcgggaccgtcggc

SEQ ID NO: 11778 - DNA, 21 bp, synthetic construct
  source 1..21: mol_type = other DNA
agcggggccgttagacaactt

SEQ ID NO: 11779 - DNA, 21 bp, synthetic construct
  source 1..21: mol_type = other DNA
gttgagcggagtgtgccgtcg

SEQ ID NO: 11780 - DNA, 21 bp, synthetic construct
  source 1..21: mol_type = other DNA
ggtgggcaaaagtctctgaat

SEQ ID NO: 11781 - DNA, 21 bp, synthetic construct
  source 1..21: mol_type = other DNA
aaagccgtcgtcatgggatcg

SEQ ID NO: 11782 - DNA, 21 bp, synthetic construct
  source 1..21: mol_type = other DNA
cttgggcatactcttagttcg

SEQ ID NO: 11783 - DNA, 21 bp, synthetic construct
  source 1..21: mol_type = other DNA
agtaaggatatgaggactacg

SEQ ID NO: 11784 - DNA, 21 bp, synthetic construct
  source 1..21: mol_type = other DNA
ctgagcgtaacatcaaaagct

SEQ ID NO: 11785 - DNA, 21 bp, synthetic construct
  source 1..21: mol_type = other DNA
gttagtcgtggtacgatttcg

SEQ ID NO: 11786 - RNA, 21 nt, synthetic construct
  source 1..21: mol_type = other RNA
  ncRNA 1..21: ncRNA_class = other; note = mRNA
tccggcgtcaacgtactatac

SEQ ID NO: 11787 - DNA, 21 bp, synthetic construct
  source 1..21: mol_type = other DNA
actgcgcagagtgtttatgag

SEQ ID NO: 11788 - DNA, 21 bp, synthetic construct
  source 1..21: mol_type = other DNA
tggagtggtggtcctggtctt

SEQ ID NO: 11789 - DNA, 21 bp, synthetic construct
  source 1..21: mol_type = other DNA
gtctcgggtaacagatctgta

SEQ ID NO: 11790 - DNA, 21 bp, synthetic construct
  source 1..21: mol_type = other DNA
tcaactgcaacacgcgtcttg

SEQ ID NO: 11791 - RNA, 21 nt, synthetic construct
  source 1..21: mol_type = other RNA
  ncRNA 1..21: ncRNA_class = other; note = mRNA
gataggcagcgggagtcgatt

SEQ ID NO: 11792 - DNA, 21 bp, synthetic construct
  source 1..21: mol_type = other DNA
attgggtcggtgtatcgtacg

SEQ ID NO: 11793 - DNA, 21 bp, synthetic construct
  source 1..21: mol_type = other DNA
gtcaacggcacaccatcccga

SEQ ID NO: 11794 - DNA, 21 bp, synthetic construct
  source 1..21: mol_type = other DNA
agtcggcaaacggatactatt

SEQ ID NO: 11795 - DNA, 21 bp, synthetic construct
  source 1..21: mol_type = other DNA
agggtagtacgtatggacgcc

SEQ ID NO: 11796 - DNA, 21 bp, synthetic construct
  source 1..21: mol_type = other DNA
gtctctaactactcgccacta

SEQ ID NO: 11797 - DNA, 21 bp, synthetic construct
  source 1..21: mol_type = other DNA
acaaacggacgtcaaggcggg

SEQ ID NO: 11798 - DNA, 21 bp, synthetic construct
  source 1..21: mol_type = other DNA
ccacgatctggctctgaatcc

SEQ ID NO: 11799 - DNA, 21 bp, synthetic construct
  source 1..21: mol_type = other DNA
acattgcgaacggaagccctg

SEQ ID NO: 11800 - DNA, 21 bp, synthetic construct
  source 1..21: mol_type = other DNA
ctgccgagggggggggtgcat

SEQ ID NO: 11801 - DNA, 21 bp, synthetic construct
  source 1..21: mol_type = other DNA
agtaatggtcctgctcctggg

SEQ ID NO: 11802 - DNA, 21 bp, synthetic construct
  source 1..21: mol_type = other DNA
gggagtcagcctcgtttttcg

SEQ ID NO: 11803 - DNA, 21 bp, synthetic construct
  source 1..21: mol_type = other DNA
gccgtcataggcacggcaacg

SEQ ID NO: 11804 - DNA, 21 bp, synthetic construct
  source 1..21: mol_type = other DNA
agaatggccgacggaggccct

SEQ ID NO: 11805 - DNA, 21 bp, synthetic construct
  source 1..21: mol_type = other DNA
tacctccacgccagcgtcgaa

SEQ ID NO: 11806 - DNA, 21 bp, synthetic construct
  source 1..21: mol_type = other DNA
gcttctcagggggcgactcgg

SEQ ID NO: 11807 - DNA, 21 bp, synthetic construct
  source 1..21: mol_type = other DNA
cggacggggcatagtggggcg

SEQ ID NO: 11808 - RNA, 21 nt, synthetic construct
  source 1..21: mol_type = other RNA
  ncRNA 1..21: ncRNA_class = other; note = mRNA
tccaacaaccaagcaaggatg

SEQ ID NO: 11809 - RNA, 21 nt, synthetic construct
  source 1..21: mol_type = other RNA
  ncRNA 1..21: ncRNA_class = other; note = mRNA
gcaatcccaaactcgcccatc

SEQ ID NO: 11810 - DNA, 21 bp, synthetic construct
  source 1..21: mol_type = other DNA
cgccaaagcgtgatacacgcc

SEQ ID NO: 11811 - DNA, 21 bp, synthetic construct
  source 1..21: mol_type = other DNA
gctaggattggtaatacgcag

SEQ ID NO: 11812 - DNA, 21 bp, synthetic construct
  source 1..21: mol_type = other DNA
ttttctacgaatgctactagt

SEQ ID NO: 11813 - RNA, 21 nt, synthetic construct
  source 1..21: mol_type = other RNA
  ncRNA 1..21: ncRNA_class = other; note = mRNA
tcgggtgttaatgtttcgtct

SEQ ID NO: 11814 - DNA, 21 bp, synthetic construct
  source 1..21: mol_type = other DNA
cttggctcatcttggacaggc

SEQ ID NO: 11815 - DNA, 21 bp, synthetic construct
  source 1..21: mol_type = other DNA
ttcgaaagaatgcacactgct

SEQ ID NO: 11816 - RNA, 21 nt, synthetic construct
  source 1..21: mol_type = other RNA
  ncRNA 1..21: ncRNA_class = other; note = mRNA
cgtcaagaaaccagactcccc

SEQ ID NO: 11817 - DNA, 21 bp, synthetic construct
  source 1..21: mol_type = other DNA
gtgggtgcgacaggcgcaagt

SEQ ID NO: 11818 - DNA, 21 bp, synthetic construct
  source 1..21: mol_type = other DNA
tacaactccggtcaaggacgc

SEQ ID NO: 11819 - DNA, 21 bp, synthetic construct
  source 1..21: mol_type = other DNA
atgaccggatctgcctactcc

SEQ ID NO: 11820 - DNA, 21 bp, synthetic construct
  source 1..21: mol_type = other DNA
tctcgccaatctttaagttta

SEQ ID NO: 11821 - DNA, 21 bp, synthetic construct
  source 1..21: mol_type = other DNA
gcgagtagggcgatgaatggg

SEQ ID NO: 11822 - DNA, 21 bp, synthetic construct
  source 1..21: mol_type = other DNA
agttattcgcgtgttgctgat

SEQ ID NO: 11823 - DNA, 21 bp, synthetic construct
  source 1..21: mol_type = other DNA
ctcatgggtagcccacgaacc

SEQ ID NO: 11824 - DNA, 21 bp, synthetic construct
  source 1..21: mol_type = other DNA
gccagaagcgcgatagggagt

SEQ ID NO: 11825 - RNA, 21 nt, synthetic construct
  source 1..21: mol_type = other RNA
  ncRNA 1..21: ncRNA_class = other; note = mRNA
atgaaatcgcaatccggcagc

SEQ ID NO: 11826 - DNA, 21 bp, synthetic construct
  source 1..21: mol_type = other DNA
ggccgcgtcagcgtgaacacg

SEQ ID NO: 11827 - DNA, 21 bp, synthetic construct
  source 1..21: mol_type = other DNA
agtaggggggatgctactatt

SEQ ID NO: 11828 - DNA, 21 bp, synthetic construct
  source 1..21: mol_type = other DNA
tttgcgcgggatactcagatt

SEQ ID NO: 11829 - DNA, 21 bp, synthetic construct
  source 1..21: mol_type = other DNA
tactcggttggacacggttca

SEQ ID NO: 11830 - DNA, 21 bp, synthetic construct
  source 1..21: mol_type = other DNA
aaggttggggttccttatgag

SEQ ID NO: 11831 - DNA, 21 bp, synthetic construct
  source 1..21: mol_type = other DNA
aagcagtcgggtgagttgagt

SEQ ID NO: 11832 - DNA, 21 bp, synthetic construct
  source 1..21: mol_type = other DNA
gcggtggttgggtcgcagctt

SEQ ID NO: 11833 - DNA, 21 bp, synthetic construct
  source 1..21: mol_type = other DNA
tccgtgagtatcacgcacgcg

SEQ ID NO: 11834 - DNA, 21 bp, synthetic construct
  source 1..21: mol_type = other DNA
gtggctagggagatgggtatt

SEQ ID NO: 11835 - DNA, 21 bp, synthetic construct
  source 1..21: mol_type = other DNA
gctactgatagggttgttagg

SEQ ID NO: 11836 - DNA, 21 bp, synthetic construct
  source 1..21: mol_type = other DNA
gtcagagccgtaggggcggct

SEQ ID NO: 11837 - DNA, 21 bp, synthetic construct
  source 1..21: mol_type = other DNA
tcatctaccatcaccgcctac

SEQ ID NO: 11838 - DNA, 21 bp, synthetic construct
  source 1..21: mol_type = other DNA
gcgacggtgcgggctattggt

SEQ ID NO: 11839 - DNA, 21 bp, synthetic construct
  source 1..21: mol_type = other DNA
ttacctcggggtggcggcgac

SEQ ID NO: 11840 - DNA, 21 bp, synthetic construct
  source 1..21: mol_type = other DNA
gccttccgcgtaccggaaacg

SEQ ID NO: 11841 - DNA, 21 bp, synthetic construct
  source 1..21: mol_type = other DNA
aagtctagtgggggtatggtg

SEQ ID NO: 11842 - DNA, 21 bp, synthetic construct
  source 1..21: mol_type = other DNA
tcccgggactctggcacccga

SEQ ID NO: 11843 - DNA, 21 bp, synthetic construct
  source 1..21: mol_type = other DNA
aagggttcgtatcctgtgagt

SEQ ID NO: 11844 - DNA, 21 bp, synthetic construct
  source 1..21: mol_type = other DNA
gcgagggagctttctatggcg

SEQ ID NO: 11845 - RNA, 21 nt, synthetic construct
  source 1..21: mol_type = other RNA
  ncRNA 1..21: ncRNA_class = other; note = mRNA
gtaaccaccagcgcaatccgg

SEQ ID NO: 11846 - DNA, 21 bp, synthetic construct
  source 1..21: mol_type = other DNA
ctcggcaccaggggcgacccc

SEQ ID NO: 11847 - DNA, 21 bp, synthetic construct
  source 1..21: mol_type = other DNA
gagggtcgtgttgttgttggt

SEQ ID NO: 11848 - DNA, 21 bp, synthetic construct
  source 1..21: mol_type = other DNA
cccggaatgaaaatgtccata

SEQ ID NO: 11849 - RNA, 21 nt, synthetic construct
  source 1..21: mol_type = other RNA
  ncRNA 1..21: ncRNA_class = other; note = mRNA
gtttcaaaccggtaccccaac

SEQ ID NO: 11850 - RNA, 21 nt, synthetic construct
  source 1..21: mol_type = other RNA
  ncRNA 1..21: ncRNA_class = other; note = mRNA
tcaaacgttcaacgtgtgact

SEQ ID NO: 11851 - DNA, 21 bp, synthetic construct
  source 1..21: mol_type = other DNA
tacgtcaggaccgtagaactc

SEQ ID NO: 11852 - DNA, 21 bp, synthetic construct
  source 1..21: mol_type = other DNA
agacaatccgtcgtccacgcc

SEQ ID NO: 11853 - DNA, 21 bp, synthetic construct
  source 1..21: mol_type = other DNA
tatttgatgactcaggttgct

SEQ ID NO: 11854 - DNA, 21 bp, synthetic construct
  source 1..21: mol_type = other DNA
aaacttgaattcgccactcgg

SEQ ID NO: 11855 - RNA, 21 nt, synthetic construct
  source 1..21: mol_type = other RNA
  ncRNA 1..21: ncRNA_class = other; note = mRNA
aggtccggaggatcgctaacc

SEQ ID NO: 11856 - DNA, 21 bp, synthetic construct
  source 1..21: mol_type = other DNA
gcaggcggggtttctcgcctc

SEQ ID NO: 11857 - RNA, 21 nt, synthetic construct
  source 1..21: mol_type = other RNA
  ncRNA 1..21: ncRNA_class = other; note = mRNA
tggatggggtcgaatgctagt

SEQ ID NO: 11858 - DNA, 21 bp, synthetic construct
  source 1..21: mol_type = other DNA
cgtggggcttcggtggggccg

SEQ ID NO: 11859 - DNA, 21 bp, synthetic construct
  source 1..21: mol_type = other DNA
tactcggttcgacccggttca

SEQ ID NO: 11860 - DNA, 21 bp, synthetic construct
  source 1..21: mol_type = other DNA
tccatgaaatcggttatgacc

SEQ ID NO: 11861 - RNA, 21 nt, synthetic construct
  source 1..21: mol_type = other RNA
  ncRNA 1..21: ncRNA_class = other; note = mRNA
gcgcatgctaatcgtggggct

SEQ ID NO: 11862 - DNA, 21 bp, synthetic construct
  source 1..21: mol_type = other DNA
gttgagggtgcttctaggatt

SEQ ID NO: 11863 - DNA, 21 bp, synthetic construct
  source 1..21: mol_type = other DNA
ctttcgcatcagtttgcggct

SEQ ID NO: 11864 - DNA, 21 bp, synthetic construct
  source 1..21: mol_type = other DNA
gtgacttctgatcggcattat

SEQ ID NO: 11865 - DNA, 21 bp, synthetic construct
  source 1..21: mol_type = other DNA
cgggatcctaattctcagagg

SEQ ID NO: 11866 - DNA, 21 bp, synthetic construct
  source 1..21: mol_type = other DNA
atgggggtgcggggtattggg

SEQ ID NO: 11867 - DNA, 21 bp, synthetic construct
  source 1..21: mol_type = other DNA
actttggggggtgttcggttt

SEQ ID NO: 11868 - DNA, 21 bp, synthetic construct
  source 1..21: mol_type = other DNA
aggggcgactacggctctacg

SEQ ID NO: 11869 - RNA, 21 nt, synthetic construct
  source 1..21: mol_type = other RNA
  ncRNA 1..21: ncRNA_class = other; note = mRNA
ctgaataagtatactgatcat

SEQ ID NO: 11870 - RNA, 21 nt, synthetic construct
  source 1..21: mol_type = other RNA
  ncRNA 1..21: ncRNA_class = other; note = mRNA
cactctcgactgagttcgtac

SEQ ID NO: 11871 - RNA, 21 nt, synthetic construct
  source 1..21: mol_type = other RNA
  ncRNA 1..21: ncRNA_class = other; note = mRNA
cttcaaatgaccaaccgggac

SEQ ID NO: 11872 - DNA, 21 bp, synthetic construct
  source 1..21: mol_type = other DNA
cgcggagccctgttagctact

SEQ ID NO: 11873 - DNA, 21 bp, synthetic construct
  source 1..21: mol_type = other DNA
ctcgaatcaacccgcttagtc

SEQ ID NO: 11874 - DNA, 21 bp, synthetic construct
  source 1..21: mol_type = other DNA
caaatgtcaacattcccctcg

SEQ ID NO: 11875 - RNA, 21 nt, synthetic construct
  source 1..21: mol_type = other RNA
  ncRNA 1..21: ncRNA_class = other; note = mRNA
gtttctaagagtgcgacgatg

SEQ ID NO: 11876 - DNA, 21 bp, synthetic construct
  source 1..21: mol_type = other DNA
gcaatgcgggacacacgctcc

SEQ ID NO: 11877 - RNA, 21 nt, synthetic construct
  source 1..21: mol_type = other RNA
  ncRNA 1..21: ncRNA_class = other; note = mRNA
tggcggtcgggttcggttgct

SEQ ID NO: 11878 - DNA, 21 bp, synthetic construct
  source 1..21: mol_type = other DNA
aggattgaggtggctgttggt

SEQ ID NO: 11879 - DNA, 21 bp, synthetic construct
  source 1..21: mol_type = other DNA
tttagttctgtgggtatgacg

SEQ ID NO: 11880 - DNA, 21 bp, synthetic construct
  source 1..21: mol_type = other DNA
tctggtgctccggctaagagt

SEQ ID NO: 11881 - DNA, 21 bp, synthetic construct
  source 1..21: mol_type = other DNA
gttgggttgaatagtcgttat

SEQ ID NO: 11882 - DNA, 21 bp, synthetic construct
  source 1..21: mol_type = other DNA
caatctccacaaacacacacc

SEQ ID NO: 11883 - DNA, 21 bp, synthetic construct
  source 1..21: mol_type = other DNA
aacagccgaccagtcaacgtt

SEQ ID NO: 11884 - DNA, 21 bp, synthetic construct
  source 1..21: mol_type = other DNA
tttagggcgcatagtgattcg

SEQ ID NO: 11885 - DNA, 21 bp, synthetic construct
  source 1..21: mol_type = other DNA
gcacgaggcatcggctcaaac

SEQ ID NO: 11886 - DNA, 21 bp, synthetic construct
  source 1..21: mol_type = other DNA
aaatcaaccgtagccagtcct

SEQ ID NO: 11887 - DNA, 21 bp, synthetic construct
  source 1..21: mol_type = other DNA
ttgcgtactgctgagatgatg

SEQ ID NO: 11888 - DNA, 21 bp, synthetic construct
  source 1..21: mol_type = other DNA
ctccggttcgaaaacagtgtg

SEQ ID NO: 11889 - DNA, 21 bp, synthetic construct
  source 1..21: mol_type = other DNA
gtgaggtcggaggcttattcg

SEQ ID NO: 11890 - DNA, 21 bp, synthetic construct
  source 1..21: mol_type = other DNA
gctaataatcggactcttggt

SEQ ID NO: 11891 - DNA, 21 bp, synthetic construct
  source 1..21: mol_type = other DNA
ggtgtgtctattcggcagacg

SEQ ID NO: 11892 - DNA, 21 bp, synthetic construct
  source 1..21: mol_type = other DNA
gggcgtttgcagggtgatagg

SEQ ID NO: 11893 - DNA, 21 bp, synthetic construct
  source 1..21: mol_type = other DNA
cgtggggggagtgatcatacg

SEQ ID NO: 11894 - DNA, 21 bp, synthetic construct
  source 1..21: mol_type = other DNA
gttccctcatcagtaatagtc

SEQ ID NO: 11895 - DNA, 21 bp, synthetic construct
  source 1..21: mol_type = other DNA
attaatggggttgttaggact

SEQ ID NO: 11896 - DNA, 21 bp, synthetic construct
  source 1..21: mol_type = other DNA
agttcgtcggggtggactggg

SEQ ID NO: 11897 - DNA, 21 bp, synthetic construct
  source 1..21: mol_type = other DNA
aatactaatgcgagtaggacg

SEQ ID NO: 11898 - DNA, 21 bp, synthetic construct
  source 1..21: mol_type = other DNA
gcgcgcacgacacaaacacaa

SEQ ID NO: 11899 - DNA, 21 bp, synthetic construct
  source 1..21: mol_type = other DNA
gtggtgggtgcgcataggatt

SEQ ID NO: 11900 - DNA, 21 bp, synthetic construct
  source 1..21: mol_type = other DNA
ggtaggggtttgaatgcgact

SEQ ID NO: 11901 - DNA, 21 bp, synthetic construct
  source 1..21: mol_type = other DNA
acttcggtgggggcgagtcct

SEQ ID NO: 11902 - DNA, 21 bp, synthetic construct
  source 1..21: mol_type = other DNA
gcggatcagaggaatgggtcg

SEQ ID NO: 11903 - DNA, 21 bp, synthetic construct
  source 1..21: mol_type = other DNA
aaaggagcaccccttgcatac

SEQ ID NO: 11904 - DNA, 21 bp, synthetic construct
  source 1..21: mol_type = other DNA
gtggcgcatgttgctatgggg

SEQ ID NO: 11905 - DNA, 21 bp, synthetic construct
  source 1..21: mol_type = other DNA
gtggctagggtgatgggtagt

SEQ ID NO: 11906 - DNA, 21 bp, synthetic construct
  source 1..21: mol_type = other DNA
cgtgtgtcgggggggaatctg

SEQ ID NO: 11907 - DNA, 21 bp, synthetic construct
  source 1..21: mol_type = other DNA
catacgaatgttcagcatgtg

SEQ ID NO: 11908 - DNA, 21 bp, synthetic construct
  source 1..21: mol_type = other DNA
ggatcacgcatgacaatgaca

SEQ ID NO: 11909 - DNA, 21 bp, synthetic construct
  source 1..21: mol_type = other DNA
atcgtaacctcaggctcaacc

SEQ ID NO: 11910 - DNA, 21 bp, synthetic construct
  source 1..21: mol_type = other DNA
agcatcgcgactgaagtgtca

SEQ ID NO: 11911 - DNA, 21 bp, synthetic construct
  source 1..21: mol_type = other DNA
acctcccgtggattcgcggcc

SEQ ID NO: 11912 - DNA, 21 bp, synthetic construct
  source 1..21: mol_type = other DNA
tctaggctggatgctgggaat

SEQ ID NO: 11913 - RNA, 21 nt, synthetic construct
  source 1..21: mol_type = other RNA
  ncRNA 1..21: ncRNA_class = other; note = mRNA
ggggtaatgggctctgacgga

SEQ ID NO: 11914 - DNA, 21 bp, synthetic construct
  source 1..21: mol_type = other DNA
agcctaacgcacagtcaacgt

SEQ ID NO: 11915 - DNA, 21 bp, synthetic construct
  source 1..21: mol_type = other DNA
aatgtgcagagtcgtttgggg

SEQ ID NO: 11916 - DNA, 21 bp, synthetic construct
  source 1..21: mol_type = other DNA
ctgccgaggggggggggtcat

SEQ ID NO: 11917 - DNA, 21 bp, synthetic construct
  source 1..21: mol_type = other DNA
gctcgtgttgctgatactgag

SEQ ID NO: 11918 - RNA, 21 nt, synthetic construct
  source 1..21: mol_type = other RNA
  ncRNA 1..21: ncRNA_class = other; note = mRNA
tctgctaaggatacgattggg

SEQ ID NO: 11919 - DNA, 21 bp, synthetic construct
  source 1..21: mol_type = other DNA
ctcgcaaaacaaggagactac

SEQ ID NO: 11920 - DNA, 21 bp, synthetic construct
  source 1..21: mol_type = other DNA
agttcgggtctggcgaatggt

SEQ ID NO: 11921 - DNA, 21 bp, synthetic construct
  source 1..21: mol_type = other DNA
gaccacggagttcggactaca

SEQ ID NO: 11922 - DNA, 21 bp, synthetic construct
  source 1..21: mol_type = other DNA
atgggaccagttcgcgacagt

SEQ ID NO: 11923 - DNA, 21 bp, synthetic construct
  source 1..21: mol_type = other DNA
agtaggcctgttgctgagtct

SEQ ID NO: 11924 - DNA, 21 bp, synthetic construct
  source 1..21: mol_type = other DNA
attcctggtagggctgaggtg

SEQ ID NO: 11925 - DNA, 21 bp, synthetic construct
  source 1..21: mol_type = other DNA
accggacgcactccaggcctt

SEQ ID NO: 11926 - DNA, 21 bp, synthetic construct
  source 1..21: mol_type = other DNA
aaggttccgttgactaatgtt

SEQ ID NO: 11927 - RNA, 21 nt, synthetic construct
  source 1..21: mol_type = other RNA
  ncRNA 1..21: ncRNA_class = other; note = mRNA
agttcgttgcctaggaatggt

SEQ ID NO: 11928 - DNA, 21 bp, synthetic construct
  source 1..21: mol_type = other DNA
attcggaatctgggtaatact

SEQ ID NO: 11929 - DNA, 21 bp, synthetic construct
  source 1..21: mol_type = other DNA
tccgggttggcaatcaaaaac

SEQ ID NO: 11930 - DNA, 21 bp, synthetic construct
  source 1..21: mol_type = other DNA
acggtttctaatatgaatatg

SEQ ID NO: 11931 - DNA, 21 bp, synthetic construct
  source 1..21: mol_type = other DNA
tctggatcacggggggacgga

SEQ ID NO: 11932 - DNA, 21 bp, synthetic construct
  source 1..21: mol_type = other DNA
ggaggctctggaataaaatac

SEQ ID NO: 11933 - DNA, 21 bp, synthetic construct
  source 1..21: mol_type = other DNA
aacaaagtcgacggactgagg

SEQ ID NO: 11934 - DNA, 21 bp, synthetic construct
  source 1..21: mol_type = other DNA
ggggcacggctctcacacgcc

SEQ ID NO: 11935 - DNA, 21 bp, synthetic construct
  source 1..21: mol_type = other DNA
atgaggcaatctacagactac

SEQ ID NO: 11936 - DNA, 21 bp, synthetic construct
  source 1..21: mol_type = other DNA
gggcgggggggggaacgtgtg

SEQ ID NO: 11937 - DNA, 21 bp, synthetic construct
  source 1..21: mol_type = other DNA
catgctgcggggttttctggg

SEQ ID NO: 11938 - DNA, 21 bp, synthetic construct
  source 1..21: mol_type = other DNA
tggggtgctcggaatgctggg

SEQ ID NO: 11939 - DNA, 21 bp, synthetic construct
  source 1..21: mol_type = other DNA
gaatcacaccgagccatccaa

SEQ ID NO: 11940 - DNA, 21 bp, synthetic construct
  source 1..21: mol_type = other DNA
tactcgcttggacccggttca

SEQ ID NO: 11941 - DNA, 21 bp, synthetic construct
  source 1..21: mol_type = other DNA
gaccttcggagcagcgtaccc

SEQ ID NO: 11942 - DNA, 21 bp, synthetic construct
  source 1..21: mol_type = other DNA
actcctcgtgatgctaggttt

SEQ ID NO: 11943 - RNA, 21 nt, synthetic construct
  source 1..21: mol_type = other RNA
  ncRNA 1..21: ncRNA_class = other; note = mRNA
catagtcggttgacgagttct

SEQ ID NO: 11944 - RNA, 21 nt, synthetic construct
  source 1..21: mol_type = other RNA
  ncRNA 1..21: ncRNA_class = other; note = mRNA
tacacccccctgcacccccaa

SEQ ID NO: 11945 - RNA, 21 nt, synthetic construct
  source 1..21: mol_type = other RNA
  ncRNA 1..21: ncRNA_class = other; note = mRNA
ctagacgtgagctggaaaggt

SEQ ID NO: 11946 - DNA, 21 bp, synthetic construct
  source 1..21: mol_type = other DNA
gtttctactcatttgaatgtt

SEQ ID NO: 11947 - DNA, 21 bp, synthetic construct
  source 1..21: mol_type = other DNA
agggcggtccaaggctctgtc

SEQ ID NO: 11948 - DNA, 21 bp, synthetic construct
  source 1..21: mol_type = other DNA
cagggtagttcgtctctgagt

SEQ ID NO: 11949 - DNA, 21 bp, synthetic construct
  source 1..21: mol_type = other DNA
ggattacaattccccagcgcc

SEQ ID NO: 11950 - DNA, 21 bp, synthetic construct
  source 1..21: mol_type = other DNA
ccgaacggctcaggctcggga

SEQ ID NO: 11951 - DNA, 21 bp, synthetic construct
  source 1..21: mol_type = other DNA
tacgtcaggtccgtagacctc

SEQ ID NO: 11952 - DNA, 21 bp, synthetic construct
  source 1..21: mol_type = other DNA
gttgtttcgggtgttgctgtg

SEQ ID NO: 11953 - DNA, 21 bp, synthetic construct
  source 1..21: mol_type = other DNA
tccctgtctggggcaaacact

SEQ ID NO: 11954 - DNA, 21 bp, synthetic construct
  source 1..21: mol_type = other DNA
atgaaatcgaccacgtacagc

SEQ ID NO: 11955 - DNA, 21 bp, synthetic construct
  source 1..21: mol_type = other DNA
catagtagtcattatcctgct

SEQ ID NO: 11956 - RNA, 21 nt, synthetic construct
  source 1..21: mol_type = other RNA
  ncRNA 1..21: ncRNA_class = other; note = mRNA
aataattctgtgcatagtgct

SEQ ID NO: 11957 - DNA, 21 bp, synthetic construct
  source 1..21: mol_type = other DNA
gcacgcccttcctccggagcc

SEQ ID NO: 11958 - DNA, 21 bp, synthetic construct
  source 1..21: mol_type = other DNA
gctgggaagcctcctcagtct

SEQ ID NO: 11959 - DNA, 21 bp, synthetic construct
  source 1..21: mol_type = other DNA
acgggtcctagtggtggtagg

SEQ ID NO: 11960 - DNA, 21 bp, synthetic construct
  source 1..21: mol_type = other DNA
atggctcgagacaacaacacc

SEQ ID NO: 11961 - DNA, 21 bp, synthetic construct
  source 1..21: mol_type = other DNA
tcgggccgtgcgatggactca

SEQ ID NO: 11962 - DNA, 21 bp, synthetic construct
  source 1..21: mol_type = other DNA
gttttggggacgagtgtgttg

SEQ ID NO: 11963 - DNA, 21 bp, synthetic construct
  source 1..21: mol_type = other DNA
cccgtgtacgggaaaagcgcc

SEQ ID NO: 11964 - DNA, 21 bp, synthetic construct
  source 1..21: mol_type = other DNA
tatatgtctcgtgctatggcg

SEQ ID NO: 11965 - DNA, 21 bp, synthetic construct
  source 1..21: mol_type = other DNA
tggagggctgctacgggtggt

SEQ ID NO: 11966 - DNA, 21 bp, synthetic construct
  source 1..21: mol_type = other DNA
atcggcggcaccccgctctct

SEQ ID NO: 11967 - DNA, 21 bp, synthetic construct
  source 1..21: mol_type = other DNA
ctgaatacggctacgagtgcg

SEQ ID NO: 11968 - DNA, 21 bp, synthetic construct
  source 1..21: mol_type = other DNA
cgaacgaccgactcacgtcaa

SEQ ID NO: 11969 - DNA, 21 bp, synthetic construct
  source 1..21: mol_type = other DNA
ggtgtttctcagccgcttcgg

SEQ ID NO: 11970 - DNA, 21 bp, synthetic construct
  source 1..21: mol_type = other DNA
agaatggcgggagggggccca

SEQ ID NO: 11971 - DNA, 21 bp, synthetic construct
  source 1..21: mol_type = other DNA
tcggcatcaccgacaaaccgc

SEQ ID NO: 11972 - DNA, 21 bp, synthetic construct
  source 1..21: mol_type = other DNA
acctccacctcaactgcatgg

SEQ ID NO: 11973 - DNA, 21 bp, synthetic construct
  source 1..21: mol_type = other DNA
agtaatggtcagaggggggtg

SEQ ID NO: 11974 - DNA, 21 bp, synthetic construct
  source 1..21: mol_type = other DNA
cctagtagtcattatcctgcg

SEQ ID NO: 11975 - DNA, 21 bp, synthetic construct
  source 1..21: mol_type = other DNA
cggatgccacaatccactgca

SEQ ID NO: 11976 - RNA, 21 nt, synthetic construct
  source 1..21: mol_type = other RNA
  ncRNA 1..21: ncRNA_class = other; note = mRNA
cgggagcagacgaggcttcct

SEQ ID NO: 11977 - DNA, 21 bp, synthetic construct
  source 1..21: mol_type = other DNA
tggcgtgtgaatgttgagggt

SEQ ID NO: 11978 - DNA, 21 bp, synthetic construct
  source 1..21: mol_type = other DNA
ctgtcgaggggggagggtgct

SEQ ID NO: 11979 - DNA, 21 bp, synthetic construct
  source 1..21: mol_type = other DNA
cttgctgctgtgaattctcgt

SEQ ID NO: 11980 - DNA, 21 bp, synthetic construct
  source 1..21: mol_type = other DNA
tcgagcaggggagtaccagct

SEQ ID NO: 11981 - DNA, 21 bp, synthetic construct
  source 1..21: mol_type = other DNA
gccaccagttcgatgagagac

SEQ ID NO: 11982 - DNA, 21 bp, synthetic construct
  source 1..21: mol_type = other DNA
gtagtcaaaggactattaatg

SEQ ID NO: 11983 - DNA, 21 bp, synthetic construct
  source 1..21: mol_type = other DNA
agtgagacgcttatgcgtcct

SEQ ID NO: 11984 - DNA, 21 bp, synthetic construct
  source 1..21: mol_type = other DNA
aacggccacatgaaaatggtc

SEQ ID NO: 11985 - DNA, 21 bp, synthetic construct
  source 1..21: mol_type = other DNA
tggcgggggggtacggtttct

SEQ ID NO: 11986 - DNA, 21 bp, synthetic construct
  source 1..21: mol_type = other DNA
ggcgaaggcatgttaagacaa

SEQ ID NO: 11987 - DNA, 21 bp, synthetic construct
  source 1..21: mol_type = other DNA
gcgggttatgatcggcattcg

SEQ ID NO: 11988 - DNA, 21 bp, synthetic construct
  source 1..21: mol_type = other DNA
ccaagcggtaaaggaggcagt

SEQ ID NO: 11989 - RNA, 21 nt, synthetic construct
  source 1..21: mol_type = other RNA
  ncRNA 1..21: ncRNA_class = other; note = mRNA
tatggtgtgtcgtctaaggct

SEQ ID NO: 11990 - DNA, 21 bp, synthetic construct
  source 1..21: mol_type = other DNA
agtaggacgggggaggctagt

SEQ ID NO: 11991 - DNA, 21 bp, synthetic construct
  source 1..21: mol_type = other DNA
tactcggttggacccggtaca

SEQ ID NO: 11992 - DNA, 21 bp, synthetic construct
  source 1..21: mol_type = other DNA
ttctccaccgccgccacaagc

SEQ ID NO: 11993 - DNA, 21 bp, synthetic construct
  source 1..21: mol_type = other DNA
gtccgttctgggggcacactc

SEQ ID NO: 11994 - DNA, 21 bp, synthetic construct
  source 1..21: mol_type = other DNA
gctgtttcggggagttatgct

SEQ ID NO: 11995 - DNA, 21 bp, synthetic construct
  source 1..21: mol_type = other DNA
aattttgcgaagggtgctctg

SEQ ID NO: 11996 - DNA, 21 bp, synthetic construct
  source 1..21: mol_type = other DNA
ggttttcagaatgggacgacg

SEQ ID NO: 11997 - DNA, 21 bp, synthetic construct
  source 1..21: mol_type = other DNA
ctgaatagtaggctgccgttg

SEQ ID NO: 11998 - DNA, 21 bp, synthetic construct
  source 1..21: mol_type = other DNA
gggaattcgggtaatacgagg

SEQ ID NO: 11999 - DNA, 21 bp, synthetic construct
  source 1..21: mol_type = other DNA
atttcgcagcctgggggtcgg

SEQ ID NO: 12000 - DNA, 21 bp, synthetic construct
  source 1..21: mol_type = other DNA
aattctttgtctaagagtggt

SEQ ID NO: 12001 - protein, 736 aa, synthetic construct
MAADGYLPDWLEDNLSEGIREWWALKPGAPQPKANQQHQDNARGLVLPGYKYLGPGNGLDKGEPVNAADAAALEHDKAYDQQLKAGDNPYLKYNHADAEFQERLKEDTSFGGNLGRAVFQAKKRLLEPLGLVEEAAKTAPGKKRPVEQSPQEPDSSAGIGKSGAQPAKKRLNFGQTGDTESVPDPQPIGEPPAAPSGVGSLTMASGGGAPVADNNEGADGVGSSSGNWHCDSQWLGDRVITTSTRTWALPTYNNHLYKQISNSTSGGSSNDNAYFGYSTPWGYFDFNRFHCHFSPRDWQRLINNNWGFRPKRLNFKLFNIQVKEVTDNNGVKTIANNLTSTVQVFTDSDYQLPYVLGSAHEGCLPPFPADVFMIPQYGYLTLNDGSQAVGRSSFYCLEYFPSQMLRTGNNFQFSYEFENVPFHSSYAHSQSLDRLMNPLIDQYLYYLSKTINGSGQNQQTLKFSVAGPSNMAVQGRNYIPGPSYRQQRVSTTVTQNNNSEFAWPGASSWALNGRNSLMNPGPAMASHKEGEDRFFPLSGSLIFGKQGTGRDNVDADKVMITNEEEIKTTNPVATESYGQVATNHQSAQAQAQTGWVQNQGILPGMVWQDRDVYLQGPIWAKIPHTDGNFHPSPLMGGFGMKHPPPQILIKNTPVPADPPTAFNKDKLNSFITQYSTGQVSVEIEWELQKENSKRWNPEIQYTSNYYKSNNVEFAVNTEGVYSEPRPIGTRYLTRNL

SEQ ID NO: 12002 - protein, 736 aa, synthetic construct
MAADGYLPDWLEDNLSEGIREWWALKPGAPQPKANQQHQDNARGLVLPGYKVLGPGNGLDKGEPVNAADAAALEHDKAYDQQLKAGDNPYLKYNHADAEFQERLKEDTSFGGNLGRAVFQAKKRLLEPLGLVEEAAKTAPGKKRPVEQSPQEPDSSAGIGKSGAQPAKKRLNFGQTGDTESVPDPQPIGEPPAAPSGVGSLTMASGGGAPVADNNEGADGVGSSSGNWHCDSQWLGDRVITTSTRTWALPTYNNHLYKQISNSTSGASSNDNAYFGYSTPWGYFDFNRFHCHFSPRDWQRLINNNWGFRPKRLNFKLFNIQVKEVTDNNGVKTIANNLTSTVQVFTDSDYQLPYVLGSAHEGCLPPFPADVFMIPQYGYLTLNDGSQAVGRSSFYCLEYFPSQMLRTGNNFQFSYEFENVPFHSSYAHSQSLDRLMNPLIDQYLYYLSKTINGSGQNQQTLKFSVAGPSNMAVQGRNYIPGPSYRQQRVSTTVTQNNNSEFAWPGASSWALNGRNSLMNPGPAMASHKEGEDRFFPLSGSLIFGKQGTGRDNVDADKVMITNEEEIKTTNPVATESYGQVATNHQSAQAQAQTGWVQNQGILPGMVWQDRDVYLQGPIWAKIPHTDGNFHPSPLMGGFGMKHPPPQILIKNTPVPADPPTAFNKDKLNSFITQYSTGQVSVEIEWELQKENSKRWNPEIQYTSNYYKSNNVEFAVNTEGVYSEPRPIGTRYLTRNL

SEQ ID NO: 12003 - protein, 736 aa, synthetic construct
MAADGYLPDWLEDNLSEGIREWWALKPGAPQPKANQQHQDNARGLVLPGYKVLGPGNGLDKGEPVNAADAAALEHDKAYDQQLKAGDNPYLKYNHADAEFQERLKEDTSFGGNLGRAVFQAKKRLLEPLGLVEEAAKTAPGKKRPVEQSPQEPDSSAGIGKSGAQPAKKRLNFGQTGDTESVPDPQPIGEPPAAPSGVGSLTMASGGGAPVADNNEGADGVGSSSGNWHCDSQWLGDRVITTSTRTWALPTYNNHLYKQISNSTSGASTNDNAYFGYSTPWGYFDFNRFHCHFSPRDWQRLINNNWGFRPKRLNFKLFNIQVKEVTDNNGVKTIANNLTSTVQVFTDSDYQLPYVLGSAHEGCLPPFPADVFMIPQYGYLTLNDGSQAVGRSSFYCLEYFPSQMLRTGNNFQFSYEFENVPFHSSYAHSQSLDRLMNPLIDQYLYYLSKTINGSGQNQQTLKFSVAGPSNMAVQGRNYIPGPSYRQQRVSTTVTQNNNSEFAWPGASSWALNGRNSLMNPGPAMASHKEGEDRFFPLSGSLIFGKQGTGRDNVDADKVMITNEEEIKTTNPVATESYGQVATNHQSAQAQAQTGWVQNQGILPGMVWQDRDVYLQGPIWAKIPHTDGNFHPSPLMGGFGMKHPPPQILIKNTPVPADPPTAFNKDKLNSFITQYSTGQVSVEIEWELQKENSKRWNPEIQYTSNYYKSNNVEFAVNTEGVYSEPRPIGTRYLTRNL

SEQ ID NO: 12004 - protein, 15 aa, synthetic construct
GGGGGGGGGGGGGGG

SEQ ID NO: 12005 - protein, 15 aa, synthetic construct
GGGGSGGGGSGGGGS

SEQ ID NO: 12006 - DNA, 12 bp, synthetic construct
  source 1..12: mol_type = other DNA
acttgtttaagt

SEQ ID NO: 12007 - skipped

SEQ ID NO: 12008 - DNA, 16 bp, synthetic construct
  source 1..16: mol_type = other DNA
ggcaccgagtcggtgc

SEQ ID NO: 12009 - skipped

SEQ ID NO: 12010 - RNA, 30 nt, synthetic construct
  source 1..30: mol_type = other RNA
gyyyyagnnnnnnnnnnnnnaanttrrrrt

SEQ ID NO: 12011 - protein, 15 aa, synthetic construct
GGGGSGGGGSGGGGS

SEQ ID NO: 12012 - protein, 7 aa, synthetic construct
TLAVPFK

SEQ ID NO: 12013 - protein, 7 aa, synthetic construct
GTLAVPF

SEQ ID NO: 12014 - RNA, 20 nt, synthetic construct
  source 1..20: mol_type = other RNA
  ncRNA 1..20: ncRNA_class = sgRNA
gttttgtgggcaacatgctg

SEQ ID NO: 12015 - RNA, 20 nt, synthetic construct
  source 1..20: mol_type = other RNA
  ncRNA 1..20: ncRNA_class = sgRNA
tgggcaacatgctggtcatc

SEQ ID NO: 12016 - RNA, 20 nt, synthetic construct
  source 1..20: mol_type = other RNA
  ncRNA 1..20: ncRNA_class = sgRNA
ctttaaaagccaggacggtc

SEQ ID NO: 12017 - RNA, 20 nt, synthetic construct
  source 1..20: mol_type = other RNA
  ncRNA 1..20: ncRNA_class = sgRNA
ccagatctcaaaaagaaggt

SEQ ID NO: 12018 - RNA, 20 nt, synthetic construct
  source 1..20: mol_type = other RNA
  ncRNA 1..20: ncRNA_class = sgRNA
gcagggctccgatgtataat

SEQ ID NO: 12019 - RNA, 23 nt, synthetic construct
  source 1..23: mol_type = other RNA
  ncRNA 1..23: ncRNA_class = sgRNA
catacagtcagtatcaattctgg

SEQ ID NO: 12020 - RNA, 20 nt, synthetic construct
  source 1..20: mol_type = other RNA
  ncRNA 1..20: ncRNA_class = sgRNA
tcaggatgaggatgaccagc

SEQ ID NO: 12021 - RNA, 20 nt, synthetic construct
  source 1..20: mol_type = other RNA
  ncRNA 1..20: ncRNA_class = sgRNA
cgtctctcccaggaatcatc

SEQ ID NO: 12022 - RNA, 23 nt, synthetic construct
  source 1..23: mol_type = other RNA
  ncRNA 1..23: ncRNA_class = sgRNA
ccttgtcaaggctattggtcaag

SEQ ID NO: 12023 - RNA, 23 nt, synthetic construct
  source 1..23: mol_type = other RNA
  ncRNA 1..23: ncRNA_class = sgRNA
gccagggaccgtttcagacagat

SEQ ID NO: 12024 - RNA, 23 nt, synthetic construct
  source 1..23: mol_type = other RNA
  ncRNA 1..23: ncRNA_class = sgRNA
agacagatatttgcattgagata

SEQ ID NO: 12025 - RNA, 23 nt, synthetic construct
  source 1..23: mol_type = other RNA
  ncRNA 1..23: ncRNA_class = sgRNA
cattgagatagtgtggggaaggg

SEQ ID NO: 12026 - RNA, 23 nt, synthetic construct
  source 1..23: mol_type = other RNA
  ncRNA 1..23: ncRNA_class = sgRNA
ttcttcatccctagccagccgcc

SEQ ID NO: 12027 - RNA, 20 nt, synthetic construct
  source 1..20: mol_type = other RNA
  ncRNA 1..20: ncRNA_class = sgRNA
aagctagtctagtgcaagct

SEQ ID NO: 12028 - RNA, 20 nt, synthetic construct
  source 1..20: mol_type = other RNA
  ncRNA 1..20: ncRNA_class = sgRNA
tcacaggctccaggaagggt

SEQ ID NO: 12029 - RNA, 20 nt, synthetic construct
  source 1..20: mol_type = other RNA
  ncRNA 1..20: ncRNA_class = sgRNA
gcctctgattagggtggggg

SEQ ID NO: 12030 - RNA, 20 nt, synthetic construct
  source 1..20: mol_type = other RNA
  ncRNA 1..20: ncRNA_class = sgRNA
cccaggggggcctctttcgg

SEQ ID NO: 12031 - RNA, 20 nt, synthetic construct
  source 1..20: mol_type = other RNA
  ncRNA 1..20: ncRNA_class = sgRNA
tggcctatgttattacctgt

SEQ ID NO: 12032 - RNA, 20 nt, synthetic construct
  source 1..20: mol_type = other RNA
  ncRNA 1..20: ncRNA_class = sgRNA
cactggaatcagctatctgc

SEQ ID NO: 12033 - RNA, 20 nt, synthetic construct
  source 1..20: mol_type = other RNA
  ncRNA 1..20: ncRNA_class = sgRNA
tcaatgggaatgaaataatt

SEQ ID NO: 12034 - RNA, 20 nt, synthetic construct
  source 1..20: mol_type = other RNA
  ncRNA 1..20: ncRNA_class = sgRNA
attcccattgagaaataaaa

SEQ ID NO: 12035 - RNA, 23 nt, synthetic construct
  source 1..23: mol_type = other RNA
  ncRNA 1..23: ncRNA_class = sgRNA
aacaccagtgagtagagcggagg

SEQ ID NO: 12036 - RNA, 23 nt, synthetic construct
  source 1..23: mol_type = other RNA
  ncRNA 1..23: ncRNA_class = sgRNA
tcactatgctgccgcccagttgg

SEQ ID NO: 12037 - RNA, 23 nt, synthetic construct
  source 1..23: mol_type = other RNA
  ncRNA 1..23: ncRNA_class = sgRNA
gctgccgcccagtgggactttgg

SEQ ID NO: 12038 - RNA, 23 nt, synthetic construct
  source 1..23: mol_type = other RNA
  ncRNA 1..23: ncRNA_class = sgRNA
acaatgtgtcaactcttgacagg

SEQ ID NO: 12039 - RNA, 23 nt, synthetic construct
  source 1..23: mol_type = other RNA
  ncRNA 1..23: ncRNA_class = sgRNA
gctgtgtttgcgtctctcccagg

SEQ ID NO: 12040 - RNA, 23 nt, synthetic construct
  source 1..23: mol_type = other RNA
  ncRNA 1..23: ncRNA_class = sgRNA
gatctggtaaagatgattcctgg

SEQ ID NO: 12041 - RNA, 22 nt, synthetic construct
  source 1..22: mol_type = other RNA
  ncRNA 1..22: ncRNA_class = sgRNA
gactatgctgccgcccagtagg

SEQ ID NO: 12042 - RNA, 22 nt, synthetic construct
  source 1..22: mol_type = other RNA
  ncRNA 1..22: ncRNA_class = sgRNA
gcagaaggggacagtaagaagg

SEQ ID NO: 12043 - RNA, 23 nt, synthetic construct
  source 1..23: mol_type = other RNA
  ncRNA 1..23: ncRNA_class = sgRNA
cagaattgatactgactgtatgg

SEQ ID NO: 12044 - RNA, 23 nt, synthetic construct
  source 1..23: mol_type = other RNA
  ncRNA 1..23: ncRNA_class = sgRNA
agatgactatctttaatgtctgg

SEQ ID NO: 12045 - protein, 7 aa, synthetic construct
  VARIANT 3: note = X can be any amino acid
VKXYGAL

SEQ ID NO: 12046 - protein, 9 aa, synthetic construct
  VARIANT 3..5: note = Up to two X residues may be deleted
  VARIANT 3..5: note = X can be any amino acid
VKXXXYGAL

SEQ ID NO: 12047 - protein, 9 aa, synthetic construct
  VARIANT 3..5: note = More specifically one X residue is present; note = Up to two X residues may be deleted
  VARIANT 3..5: note = X can be any amino acid
VKXXXYGAL

SEQ ID NO: 12048 - protein, 4 aa, synthetic construct
GGGS

SEQ ID NO: 12049 - protein, 5 aa, synthetic construct
  REGION >5: note = The entire sequence of amino acids 1-5 can be repeated in multiples of 3
GGGGS
